United States Patent Application Publication US 2022/0008368 A1 - sequence listing, part 9

SEQ ID NO: 2 - DNA, 58617616 bp, Homo sapiens (residues 17,368,185-19,539,207 of 58,617,616)
  modified_base (1)..(60000): a, c, t, g, unknown or other
  modified_base (24448981)..(24498980): a, c, t, g, unknown or other
  modified_base (24552653)..(24552752): a, c, t, g, unknown or other
  modified_base (24891257)..(24891356): a, c, t, g, unknown or other
  modified_base (24895791)..(24895890): a, c, t, g, unknown or other
  modified_base (24898314)..(24904771): a, c, t, g, unknown or other
  modified_base (24908590)..(24908689): a, c, t, g, unknown or other
  modified_base (27190875)..(27240874): a, c, t, g, unknown or other
  modified_base (58607617)..(58617616): a, c, t, g, unknown or other
cctcagtctccctagtagctgggattacaggcacgcaccaccatgcttggctaatattgtattttttagtagagacagggtttctccatgttggccaggctggtctcaaactcccatcctcaggtgatccgcccacctcggcctcctaaagtgctaggattacaggtgtgagccaccgcactcggccgaactaatttttgtatttttagtagagacagggtttcaccatgttggccaggctggtttcaaactcctgacctcaggtgattcgcccccctcggcctcccaaagtgctgggattatagtcgtgagccacctctcctggcagaagtagggtctttagagaggtaattaagttaaggtgaggtccttagggtgggtcctaatccaacatgactgatgtccttataaagagaagagatttggacacagagacacggacagaaggaagaccaagagcagacacaggaagaagatgccacctgcaagccaagtagaaagacctggaacaggccggctatggtggctcacgcctgtaatcccagcactctgggaggccaaggcgggtggatcacgaggtcaagagttcaagagcaacctggccaagatggtgaaatcccatctctactaaaaatacaaaaaaattagcagggcatgttggtgggcacccgtaatctcagctactggggaggctgaggcagagaattgcttgaactcggggaggcggaggttgcagtgagccgagatcgcgtctctgcactccagtccagcctgggtgacagagcgagactccgtctcaaaaaaacaaacaaacaaacaaaaacctggaacagatccttccctcacagcctcagaaggaaccaaccccgctaacactttgatcttggtaccacccagtctgtaataccttgtcatggaagccctagcaaattaatacaaatgctaacaccatctcatgaggcaaacaacagtctttaaaaaaaacctttttttgtttttttttttgttgttgtttttgagacagggttttttgctctgtcacccagcctggagtgcagtggcacgatctcggctcactgtaacctccgtctcccgggttcaagtgattccccagcctcagcctctcgagtagctgggattacaggtgtgcaccaccatacctggctaatttttgtatttttagtagagacagggtttcgccatgttggccaggctggtctcgaactcctaacctcaagtgatctgcccaccaccagcctggccaacatggcgaaaccccatctttgctaaaaatacaaaaattagccaggcatggaagcgcatgcttgtagtcccagctatttgggagtctgagccaggagactcgcttgaatccgggaggcggaggttgcagtgagatgagattgtgccaccacactccaacctggggaacagagtgagactctatgtccaaaaaaaaaaaaaagaaaaattaaaattaaattaaataagatatgcaaatggccaaagagcatatcaaaagacattcaaaatcggctgggcgcggtggctcacacctataatcccagcactttgggaggccaagacaggtggatcacctgaggttgggcattcgagaccagcctggccaacatggtgaaaccccatctctactaaaaatacaaaaaaattagccaggcctggtggcaggtgcctgtaatcccagctacttgggaggctgaggcagaagaattgcttgaacccgggagatggaggttgcagtgagccacgatcacaccattgcactccagcctgggtgacagagcgagagtctgtctaaaaaaaaaaaaaaaaaaaaaaaaagaaagatattcaaaatcattagccattacggaaatgcaaatcaggaccacagtgagataccactacacacccacgagggtggctattttaaaaacccataaacccccaaaatgaacagtaacaggtgttgatgaggatgtggggaaatcagaattctcagacagtactagtgagaatgtacaatgttgcaacggctttgggaaagtctggcagttcctcaaaatgttaaacatagttaccacgtgacccagaaactctacttctcagcatatacccagagcaatggaaacacatcctcacatcaacttgccaggaatgtccacagccgctcgattcacagtagccaaaggtggaaagaacccaaatgcctgtcagcagatgaattaacgcacaaaatgtgttccttccatacatagaacatgattcagccataaaaaggaaggaagcactgatccatgttgcagtgtgtgtgaaccccaaaaacatgatgcctaagtgagagaagccggacacaaaaggccacagaatgtgagattccactgacatgaaatgcccagaacaggcaaatccatagagacaggaagcaggttggtggctgtcagggattgggggaggggaatgggaagtgactgctgatggggacgtgggttttcttttgggaaggtgaaaatgttctaaaataatgttctaaaatggatcgtggtgatcaatgtacaactctgtgaatttacaaaaaaatcatcaaattggctgggcgcggtggctcacgcctgtaatctcagcactttgggaggccgaggcgggcggatcacgaggtcaggagatctagaccatcctggctaacacggtgaaaccccatctctactaaaaatacaaaaaattagccaggcgtggtggcgggcgcctgtagtcccagctactcgggaggctgaggcaggagaatggcgtgaacctgggaggcagagcttgcaatgagctgagatcgcgccactgcactccagcctgggcgacagagcgagactccatctcaaaacaaacaaacaaacaaacaaaaacatcaaattgtacactttaaataggtggattgtaaaatacatgaattatatatcaataaagctgtttttaaaaattatttattattattattattattgagatggagtctcgctctgtggcccaggctagagtgcagcggtgtgatctcagctcactgcaacctctacttcctgggttcaagtgattctcatgcctcagcctcccaagtagctgggaatacaggggtgcaccaccatgaccagctaatttttgtattttagtagagacggggttgcaccatgttagccaggtggtttcgaactcctgacctcaagtgatccactggcctcagtctcctgccttgacttcccaaagtgctggaattacagacgtgagctgccacgcccggccagctatttttattttaatttaattttattttttttgagacatggtctcactctgccacccaggctggagtgtggtggtgtgatcacagctcactgcagcctcagcctccccaggctcgggcaatcctcccacctcagtctctcaagtagctgggattacaggcacgtgccaccactcctggctaattttttatagagatggggtctcaccatgttgcccaggctggtcttaaactgctgagctcaagcaatccacccaccttggcctcccaaaatgttgggattacaggtgtgaaccaccacgcctggccagcaaagctgtttttaaagaaagtgttcacaatttaacaaactaaagccatgcctttcaaactttggaagagaaccctctgcagaaatataataagacatgaagaatcaggagagtttgtctttctgcaactctctgtccttcatccttttgcagttggccctgggtgaatgtcctggggggacatggggaatgccttctgttctcaaaagccttagtcattaggaggctgaggtgggaacactgcttgaggctgggagttcgagaccagcctcggcaatgtagtgacaccatgtctctaaaaaaaaaaaaaaaaaaaaaggatgtgatttttaagtttcttttttaatttttagtttattttttatagagaagaggtgtcttgggaggctgaggcaggtggatcacctgagatcaggagttccagaccagcctggccaacatggggaaaccccatctctactaaaaatacaaaaaattagctgggtttggtggcgggtgcctgtaatcccagctactcgggaggctgaggtaggagaatcacttgaacccgggaggcagaggttgtagggagctgagattgcgccactgcaatccagcctgggcgacagagtgaaactctgtgtcaaaaatagtaataataataataaaataattaaataatgtttttatttatttatttatttattttttgagacggagtctcgctctgtcgcccaggctggagtgcagtggcgcaatctcggctcactgcaagctccgcctcccgggttcatgccattctcctgcctcagcctcccgagtagctgggactacaggcgcccaccaccacacctggctaatttttcgtatttttagtagagacggggtttcactgtgttagccagcatggtctcgatctcctgacctagtgatccacccacctcggcctcccgaagtgttgggattataggtgtgagccactgcacccggccaataatttttttttaaatgaaaagacaggccaggtgcagtggctcacacctgtaatcccagcactgggaggccaaggcgggcggatcacgaggtcaggaaattgaggccatcctggttaacatagtgaaaccccgtctctactaaaaatacaaaaaaaaaattagcagggcatgttggcgggcacctgtagacccagctactcgggaggctaaggcaggggaattgcttgaacccaggaggcagaggttgcagtgagtggataccgcgccattgcaccccagccttggcgacagagctagactctgtctcaaaaaaaaaaaaaaaaaaaaaaaaaaaagaaagaaaagacaccagttagccaggttcaggtctgagaggggaggcagggctctaatctgaggatctaaggggcaggcaggaccctattgggagggtctgagggaggggcacagttatgccctggggactgaggggtgttccaccccatcttggggggctgaggtgagacctaccatactctgggcatctggggagacggtgctttgccccggggttttggcggatagagacagggccctacccctggggctctgggcgaggggttgaggtggaggtagggccccgccattaggggtctgaggtgaggagactgagttctgccttgagcaggactgagggggctgagcttaccttcctgcccagtgcggacggctgggtggtctgaggtcctatgggaggtctgtctttgccactgcctgggccctggccagccaggtcacctccttggaagaccctgaagctgcctcttcagccttccctcaccccaccctcccatctctcacccacctcacccttaaggagagagccccacacctgctccccacaatgtctcagggcaggcgggacaccccctggatgaagttgtgtctgagaacacggggataattgtctagtgagtttgacacaagccggggtgcgagagtggcgcgatggtctccaggagaccccagatttgcagctgtgactttgcccagagagcccgcctgtttctgccacctcaagaaagtcacctcccctctcatgccttcactttcctgcctgcaaagggtttaaaacttctgctgcccaggcgcaatggctcactcctgtaatctcaacactttgggaggccaaggcaggtggatcacttgaaggcaggagtttgagaccagcctggccaacatggtgaaaccccatctctactaaaaatacaaaacttagccgggcatggtggggcgcacctgcaatcccagctactcgggaggctgaggcaacagaatcgcttgagcctgggaggcagtggttgcagtgagccgagaccttccactgcactccagccttggcaacagagggagaccctgtctcaaacaaaacaaaataaaacaaaacagccgggaacggtggctcacgcctgtaatcccagcactttgggaggccgaggcgggtggatcacagggtcaggagatccagaccatcctggctaacacagtgaaacccggtctctactaaaaatagaaaaattagccaggcatgacggcgggcgcctgtagtcccagctactcaggaggttgaggcaggagaatggtatgaacgcagaaggtggggcttgcagtgagccgagactgcgccactgcactccagcctgggtgaaagagtgagactccatctcaaacaaaacaaaacaacaaaagcttctccctacttcccgggatttggcaatgagttaatatttctaaattcaacacccagcatacagcaaatatggactgtttatacatgctagaattgaacaggaacaaaacactgtgaacttttattcagtccatcctttttttgtttttttttttccattcagggtctcactcagtcgcccaggctggagtacagtggcactatcttggctcactgcagccttgacctcctgggctcaagtgatcctcccacctcagcctcccaagtagctgggactactggcatgtgccaccatgcctgactaatttttgtatgtatgtatgtatgtatgtatgtatgtatttatttttagacagagtctccctctgttgcccaggctggagtgcagtagtgagatctcggctcactgcaatctctgcctcccaggttcaagtgattctcctgcctcagcctcccgagtagctgggactacaggcacataccaccatacccggctaataatttttgtatttttagtacagacggggtttcactaggttggccaggctggtctcaaatttctgacctcaagtgatccacccaccttggcctctcacagtgctgggattacaggtgttagccagtatgcctggcctaatttttgtactttttgtacagacagggtttcaccatgttgcccaggttggtctcaaattcctggactcaggtggtcctcctgcctcggtctcccaaagtgctgggattacaggtgtgagctactgtagccggtcttcagccacttatttgcagcttgtgtgtgctggacccctttgattagtgctggcacattctgggagcttcatgcatagtaagttatgggctcaggactgccaattaacacacaggaggagaattaaacttggattccaaaaagacaatgaatattattttcaaaattatatctcaaatattgcatggaatatacttacagtttaaaaaaaatgttgctggctgggaatggtggctcatgcctgtaatctcagcactttaggagggtgagcctaggagttcaagaccagcctcagcagcatagtgagattctgtctctaaaaaaaagttagccagggcaccaggtcagggcacggtggctcatgcctgtaatcccagcactatgggaggccgaggtgggtggctcacttgaggtcaggagtttgagaccagcctggcaaacatggtgaaaccccgtctctactaaaaatacaaaaattagctggcatggttgcacacgcctgtaatcccagctactcaggaggctgaggcaggagaatcacttgaacctgggaggtggaggttgcagtgaggcgagattgtgccactgcacttcagcctgggtgacagagcgagactccgtctcaaaaaaaaaaaaaaaaattgccaggtgtggtggtgcccacctgtaatctcagcactttgggaggtccaggagggaggattgtttgagcccaggagttcaagaccagcctgatcaacatagcgagaccccacgtctactaaaaataaaaaatgacctgggcatagtggcatgtccatagtgccagctactcaaaaggctgaggcaggaggattgctggagcccaggatgtcaaggcttcagtgagctatgctcacatcactgtgctccagcctgggtgacagagtgagaccctgcctccaaaaaaaagaaaagaaataaaaaaaatttagctggacgcagtgccccacacctgtaatcccagcagtttgggaggctggggtgagaggattgcttgagcccaggagttcgagactagcctgggcaacatagtgagacctcatctctgctaaatataaacatattagctgggtgtggtggtgcacgcctgtagtcccagctactcaggaggctgaggcaagaggatcacttgagtccaggagattgaggttgcagtgagctgtgatagcaattgcactccatccagcccaggatacacatggagaccctgtctcttaaggaaaaaaaaaaaatctatcggccgggtgcagtggctcacgcttgtaatcccaacaatttgggaggccaaggcaggcgtatcacttgaggtcaggagtttgagaccagcctggccaacatggtgaaaccccatctctactaaaaatacaaaaatgagccggttatgatggcacatgcctgtaatcccagctactcgggaggctgaggcaggagaatcactccaacccaggaggcagaggttgcagtgagccgagattgcaccactgcactccagcctgggagacggagcgagactctgtctcataagaaaagagagcattggtcctgtgatcgtccccctctcttggatgaggaaactcaggctcagagaggtgagggggcttgctcagggtccccagggcgagtgtcctgcccacagccttacccggtcaccctggcactggcggaagctggcattgatgcggtccaggtcgcggcgagcattcagccacatctgcatgatggcatccttggcgcgggtggtgaagttgagctccttggtcaagttggactgggaggccgtgagccctaggagctgactgtataggccctcggctcggcgctcggtggcctgcaggttggactctgtgctcacgtgcacgttgccatagaccatgaagagcacgagccccaggatgatgaggaattggatgagggagacgaagaggaagaagtagcgcaggtaataccagcagccccgagagctgccccccgcccgagcgtaggaccctccgtgctccatggccagacccatttgctcgatcccgccgtccggtgcaccgtccctgctcaccaccaggcctgctctggcccccgcctcgcaggggggagtgcttatattactcctcttaatacttcctctgcctggctccttcctggcccggaggaaacgggggctgcgggttatcacaacactcccactctggctgtgagaaggcgggggtggggctgggggcccagagccagggcaccggctggacccctctgattaatgctgggtggggcgctggctggctggtcaggcattcctggcctcttcgagcctcgcgttcgcctttacttgctggcgggtgctgttctcagtacctgctgtgattaggtcgctgaatcatgccaggtctgttgctgtctcccttgtgtggcggaggaaactgaggcacagggaggagaaggggttgcctcggggtctcacgctgttagttcagcgaacttgacttacctcaagacaggctggctacagacgtgcacccacttcaccagggcggtgctgattaagtgccacaaaacgtgggaaatgtgccaggcacggtggctcacgcctataatcccagcactttgggaggctgaggcggacggatcacctgaggtcagaagtttgagaccaacccggtcaccgtggtgaaaccccccgtctctactaaaaatacaaaacttagccaggtgtggtggtgctcgcctgtaattccagctacccaggaggctgaggcaggagaatcgcttgaacccaggagtcggaggttgcggtgagcagagatcgtgccattgcactccagcctggggtatagagcaagactctgtttcaaaaaaaaaaaaaaacagaaaaagtgtgaaactcttagctagcctagggatggagaagcagtaggtgattagtaattgcataggagggcgtcacggagggctgagccatggatggcggtggcgctggctccccaagctctgtcattgcccccagtgccctgttcacttagatgctcagtaaatgctccaggaaactgcagcacaaggaataatgaacttggagcggggaagagctggctttgtcccgggagagctcgggcaagaggcctcgcatgtctgtgcctcccttttcccctttgtgagacggggtatacccagtgcctcgtcactctgtggctgttgttatgattaggatcatttcctgctggaggcactgctgggggctccgtgagatggtgaatgacaagtggtggatacgtgggactgagattcctcccccgacactcaaaaccccatgggcggccgggcatagtggctcacacctgtaatctcagcactttgtgaggctgaggcaggcggatcacctgaggtcaggagtgcgagaccagcctggccaatatggtgaaaccccatctccactaaaaatacaaaaattagccgtgtgtggtggcgagcacctgtaatcccagctgcttgggaagctgaggcaggagaaccacttgaacccgggaggcggaggttgcagtgaagcgagatcgggccactgcactccatcctgggagataagagagaaactctgtctcaaaaacaaaaacaaacaaaccaaaaaaaccacgggagttttctggggtcgctgtgggtcaccccccagttgggcctggaggggatttggggacccggaagcaaaggattctgtgtgtcctgcctatctcccaggatcaggagctccagggaaaccctccctggagtcccttctttgtttgctccatgctgggtgatgccagggccccccaagaggtgtcagtcccaacctcagccacaagcaactcccagtcttgggagacagactgggacaggtaccccccaccctgtggagtcagggtgggctggaggaacaggagcagggagccggaaaggaggctggactccggacaggtgacaatcatgcaattgctgtcctctgtagggcaatgtgaaggctggggcgtggggacccgtccccccattagccagggtaacagagtggggaggggtcgttgacagagcggaggggtactccagggtggtgctcagtgaggcgagtgtagagttgagaagaaggaagttcccaggggtgggcaggaaacccatgtctgacctttgacctttgcagctacccggtggttcctgatcctgattccggacccttcccagcggcgtcgtcggcggctgctagtgggggaaggagggctgggggctgccacgggtgcccaaccagccatttctctgggttggccagacccacccagagccccccagagctgggcaggaggagaacatcctccgtaatgggggcaatgtagtctgagtgaacccagcattacagtttagagttctggagttgagttctgactgtgccacctaccagctttgtggccttggagaagtgactttccctccctgggcctcagttttctcctgtccgaagtggagatagccaggtgcagtggctcacacctgtaatcccagcagttagggaggcagaggtgggagaatcgttggagcccacaagttcaagaccctgttctaaaaaaaaaaaaacccaaaaaacaaaaacaaaacaaaaatcaagtgaagacaacatagccagttttttttgttttttttttttgttttttttttttttttttgagatggagtctggcactgttccccaggctggagtgcagtggcactatcttggctcaccacagcctctgcctcctgggttcaagggattctcctgcctcagcctcctgagtagctgggactacaggcacgcgccagcatgcctggctaattttttgtatttttagtagagacagggtttcaccaggctggtctcaaactcctgacctcgtgatccgcctgcgtcggcctcccaaagtgctcggattacaggcgtgagctacctcacctggccaacaacatagccagttttgaagtacttgacgtcatgcctggaacatactcagtcttaataaatgatggccttttttttttgagacagagtcttgctctattgctcaggatggagtgcagtggtgcgatctcggctcactgcaacctctgcctccagagttcaagcaattctcctgcctcagcctcccaagtagctgggattacagatgtgcagcactactgctcagctaatttttgtatttttagtagagacggggttccaccatgttgaccaggctggtcacaaactcctgacctcaggtgatccacctgccttggactcccaaagtgctgagattacagaatgaaccaccgcaccgggcaatgatggcattttttaagatgtgagggctggatcatgcctggcctctgatgtcaggctgaggaactcagacataggggaggggcagtattcccagctgccggtgccccaggcctgtgagagcactggggaaaggagagcatgatggggatgaagtgtgggtgaccagggtccagcagaggagctgaggctgggtgcagtgtctgggccaatgccagtagatgtgggtcttggtgtacacttaagatcttggctgttcttcattgtatatagaagatgttgcatctatgtatgtatgaatgtgataccagttgacaaggaaaaataaaggcaacctcaaactcccagaaaacaaaaagccccccggacctgatggtactgatgtgccacaattttgaacagttgtcaccatgtgagaagcagagttttaaatatacataccaatgttatttgtatcaagcccaaaaacaatatttggtgtccttttctaatttgatctcacacctttaatttgtaatgtttctgttttggatcatttgttatattagctgatttaactttgtaactttttgtttgtttgttttgaggcagagttttctcttgtcgtccaggctggcatgcaatggcatgatcttggctcactgcaacctccacctctgggttcaagtgattctcctgcctcagcctcctgagtagctgggattacaggtgcacaccaccatgcctagctaattttttttttttttttggtattttttagtacagatgggctttcgccatgttggccaggctggtgtcgaactcctgaccacaggtgatccacccacctcatcctcccaaattgctgggattacaggcgtgagccaccacgccaggcctgatttttttttttttttttttttttttttttttttttttttttttagcaaaaagggtaggctgggggtcgtggctcacacctgtaatcccagcactttgggaggtcgaggcgggtagatcacgaggtcaggagttcgagaccagcctggccaatatggtgaaaccccatctctactaaaaatacaaaaattagctagatatggtggcggatgccagtactcccagctacacgggaggctgaggcagaagaattgcttgaacctgggaggtggaggttgcagtgagcccagatcgtgccactgcactctagcctgggctacagagtgagactccatctcaaaaaaaaaaaaaaaaaaaaaggtaaagatagaccttcctctttttgcacagtattatgtctttgagattcattgactcctatggctggctgtttaggttttcaccagatacagtaccataaaattatgaatggacacttagattttttctgagttagtttttcaataaataaaagaagatttaaaatcaaatttcctggctgggtgcggtggctcacatctgtaatccaaagcactttggaaagccaaggcaggcggatcacttgagtccaggagtttgagaccagcctgggcaacatgttgaaatcccatctcttcaaaaaatacaaaaattagccgggtgtggtagtcccagctacttgggaggctgaggcagagaattgcttgaatccaggaggcacaggttgcagtgagccgagatcacaccactgcactccagcctgggtgacagagtgagacccggtctcaaaaaaaaaaaaaaaaaaaaaaagaaagaaagaaagaaagaaagaaagaaagaaaatcaaatttccagaaatgaatgaaattactgggtctcaaagtgggcacatttttacattttgatagttgtcaccaatttgtccttcaaagaggttgttttcattgacatctttgcctgcgatgtctgaaatctccaaacatggactttatgaaaatgttctgtttgtgtccttggccagaaaaatctggagggagaatgtgagtgcctgatcaagaatctacatgaagtcaaatgcatcagccctgatgtgagtgttgggttttttcctgaaaacaatttgtcatgttcacaggaaattttgcacatgaatcccttcaaattcccttggaggggcatcagaaaatcaggcttgctttttaaacccttttgtttttctaaacagaaaacaattgatttggtttcatttgtttgtttgagtggagaaggaaaaactgtcatgaggaagtcaactctgtgtcactccctgaaaactgacactgaagtcctcatggagacacgagttaaaaaaaaacaaaatcactcagaacttcaggaaggtccttgaggaagtgatatttctggtgaagaaggatttcagtgaagttcagaaaaccttccactattttgtttttttttttttgagacggagtgttgcgctgttgcccaggctggagtgcagtggcacgatcttggctcactgcaagctccgcctccttccgggttcatgccattctcctgcttcagcctctagagtagctggggactacaggctaattttttgtgcctttagtagagatggggtttcaccgtgttagccaggatggtctcgatctcctgacctcgtgatccacccacctcggcctcccaaagtgctaggattacaggcgtgagcccctgcgcctggcttttttttttctttttctttttttgttttttttgagacggagtctcgctctgtcgcccaggctggagtgcagtggcgccatttcggctcactgcaacctctgtctcccaggttagagcaattctggctcagcctcctaagtagatgggactacaggtacacactaccacccccggctaattgttatatttttaatagagactgggtttcaccatattggacagactggtcttgaactcctgacctcaagtgatcctcctaactcagcctcccaaaatgctgggattacaggcattagccactgcaccgggccaaccctccacttttatgtctgtgagtttggtttttggttaatcgaagtgaagttaagttttgtgcttttggaggtgacggaggcagcgaagagagtccctctgtggggtgggggaaacctgtgctctctgggactctgtgttccctgctgaaaaacagggacctaggctgggcgtggtggctcacgcctgtaatcccagcactttgggaggctgaggcaggcagatcacctgaggccaggagtttgagaccaccctgaccaacatggagaaaccccgtctctactaaaaatacaaaactagccaagtgtcctggcgcatgcctgtaatcccagcactggggaggctgaggcagaagaatcgcttaaacccgggaggtggaggttgcagtgagctgagactgcgccattgcactccagcctgggcaacaacagtgaaactcggtgtcataaataaataaataaataaaaagaaaaacagggacctacttccttgcctgtgactggagggctggaaaggtcaggttgcaactagcccatgtcccctcctgccaaggccactgtgggctttccatttttgtcccctacccctgtccctccagctatgggaggggaggtccagtgtggccacggatagggattacccaggatggtgccctggagacaggggtagacagacagagataaccagagacagaaagacacttaaagagatgaccagcagagggcgggtgctgttgctcacgcctgtaatcccagcactttgggaggccgatgcaggtgaatcacctgaggtcaggagttcgaaaccagcctggcccaacatggtgaaaccctgtctccactaaaaataaaaatattggccaggcgcagtggctcacacctgtaatcccagcacttggaggccgaggcgggcggatcatgaggtcaggagttcaagaccagcctggccaacatggcgaaaccccatctctactaaaaaaaatacaaaaattagctaggtgtggtggcacgtgcctgtaatcccttgggagtctacttgggaggctgaggcaggagaatcacttgaacccaggaggcggaggttgcagtgagccgagaccacgccactgcactccagcctggcgacagagcgagactccgtctcaaaaaaaaaaaaaaaaaaaattagcccagtgtagtggcacgtgcctgtaattccagctacttgggaaggtgaggcaggagaatcatttgaaccagggaggtggaggttgccgtgagccgagatcacgccactgcactccagcctggggaacagagcaagattccgtctcaaaaaaaaaaaaaaaaaaaaaaaaggctgggtgcggtggctcaggcccataatcccaacactttgggaggccaaggcaggtggatcacctgaggtcaggggttcaagaccagcctggccaacatggtgaaatcctgtctctactaaaaaaaaaaaaaaaaaaaaaaaaatttgctggctgtggttatgcgcacctgtaatcccagctactcaggaggctgaggcaggagaatcacttaaactgagggggcggaggttgcagtgagccaaaatcgcaccattgcactctagcctaggcaaaaagagcgaaactccatctcaaaaaaaaaagaaagaaagagagagatgatcaacagagaccaagagggatcattagacaggtggaggcagggagacagaacaaggacagctcagtggctggctctgtagggtgggaggcaggtctcactgagaagtgctgtttgcctctctgggcatccagggagcctcagtgcagaccaagttctcagcctaccctcctcaagtcacctcgaatactcaccgactcttgtcttatgacttccctggggttcaaagcctccagcctcaaattccccgcttcccaaaattctttgacactagttctgcctgtgcccctcctacttacacatctgccatggctccctatcaccctccatccccagaactgattttttttttttttggagacggagtctcgctctgtcgctcaggctggagtgcagtggcgcgatctcggctcactgcaacctctgcttcccgggttcaagcaattctcctgcctcagcctccggaatagctgggtttacagatgcccatgaccacacccagctatttttttgtatttttagtagagatggggtttcaccatgttggccgggctggtctcgaactcctgatcccaagtgatcagtgcgccttggcctcccaaagtgttgggattacaggagtgagccaccacggctggctcagaactgatgttcagtggtccctcgggtatggtcaagatggagccagcagtggaaataaatgcataatggtgacaatgacttagttcccatggacagccctgtgccctgccctttacacgggccagttcttggaccacacagcgccgtggtgagggggtcttgcgtccctggggtcctggctggggcgaggccagtctccaggcttccagctctggctgactccagaaggaggaaccgtttcctgctggcttctggattgacgccagggccgggggaggtggtctcagacccaccctgtccgactctcaaactctgggccctcaggaggctgcaactggatctgctggctggggcggcccctggtggccgttggcggaacacaacagctagatctccccttcccgcagcctcattttccccataggcagagcctccagatgagccccctctcaggtgaaggtcctgatcaggcacctacaaaccccaggtggatgggaggatcgtgagcaggactggctaaagggggtggtgtcagagttccaagagcttccaatcccctctctacaccggcctcttaggaattttttaaatttatttttatgtacttagtttttgagtaacaggtctcactctgtcacccagactggagtgcagtggctacgatctcagctcactgcaacctccacctccagggttcaagcgattctcctggcacagcctcccgtgtagctgggactacaggtgtgcaccaccacgcccggctaattgttatttgtatttacttatttatttttttgaaatggagtctcgctctgttgcccaggctggagtgcagtggtgcaatctgggctcactacaacctctgcctcccagattcaagcgattctcctgcctcagcctcccaagtagctgggattacagacgcccaccacctcgccctgctaatttttgtatttttagtagagatggggtttcaccatgttggccaggctggtcttgaactcttgacctcagatgatccacctgcctcggactcccaaagtgctgggattacaggtgtgagccaccgtgcccagcctattcatttagtttttgagacagggtctcactctgtcgcccaggctggagtgcaatggagtgatcttggcttactgcaacctctacccccagggttcaagcgattctcctgcctcagcctcccaagtagctgggactacaggtgcgcaccaccacgcctggctaatttttaaactttttgtaaagatggtggtctccttacattgctcaggctgttctccaactcctgggctcaagtgatcctcctgcttcagcctcccaatgtgctgggattatagacacgagccaccaccacactcagcccagacatttttaaaaacaatttttaatttttaatttgtaataagtgacacatgtgcatggtttttaaaaatgcaatttttacaaaaggtacatagagaaatgtgcaagtatgtcccccaccgattcccagacccctggttcgctccccagaggtggaggctgtgaccagcatctccttcagagatatttggataaaagtcccctccccaagccctacacacacacacacacacaaaaacgggggccgggcacagcggctcaggcctgtaatcccagcactttgggaggccaaggagggtggatcacccgaggttagcaattcgagaccagcctggccaacatggtgaaaccccgtctttactaaaaaacacaaaaaactagctgagtctggtgatgggcgcctgtaattccagttactcgaggctgaggcaagagaatcgtttgaacccgagaggcggaggttgcagtgagctgagactgcgccattgcactccagcctgggcaacaaaagcaagactctatctcaaaaagaaaaaaaaagaaagaaagaaagaaagtacacaacttatcaatctcctgcttttcacattaacatatcttagagaagatctgctttggctgtttaaatggtggttgcatagcgttccactgtggatggacagacactttttctttttctgtctttcttttctatttatttttattttttttgagacagagtctcactctgtcacccaggctggagtgcagtggtgcgatctcagatcactgcaagctccgcctcccaggttcatgccattctcccgcctcagcctcccaagtagctgggactacagatgcccaccaccatgcccggctaattttttgtatttttaatagagaaagggtttcaccgtgttagccaggatggtctcgatctcctgacctcgtgatccgcccgcctcggcctcccaaagtgctgggattacaggcgtgagccacccccgggctctttttttccttttttttttttttttttttttttgagacaggatctcactcagtcacctaggctggagtgcagtggcatgatcatggctcactgcagcttccacctcctgggcttaagtgatcttcctgcttcagcctcccaagtagctgggaccacaggtgcatgccaccaagcctggctactttcttctctttctttcttttcttttttgtctttcttttttctttctttctcttctttcttttcttgaaggggttttgctccagtcaccctagcacgatcttggctcactgcagcctctgcctcccaggctcaagtgatcctcccacctcagtctccgaagtagatgggaccacaggtgcatgccaccatgcccagctaatattttgtatttttggtagagaatgggtttcaccatgttgcccaggctggtctcaaacacctgagctcaagtgatccacccgcctcagcctcccaaagaattttgaaacaattatttgtagagacagggtctccctatgttgcccagactggtcttgaacttcagggctcaagagatcctcccgccttagcctcccaaagtattgggcttacaggcatgaaccactgtgcccagcatgattttcttaataatttttttatagctttaatttttcatgtttaatttttgagaccgggtcttgctctgtcactcagaggactgaagtgcagtggtgtgatcatggctcactgcaaacttgacgtcctgggctcaagtgatcctcccgcctcagcctcccaagtagctggggctacagatgcatgtcaccatgctcagctaattattgatattatttgtagagacaggttcttgctatggtgcccaggctggtcttgaactcctgggctcaagtgatcttcttgctgtggcctcccaaaatgttgggattacaggcgtgagccaccacacctggccagctttgagtttggaggagtcaaagttatgtgtgaattttcaactgcatggagaactggtgcccataacctttgtgttgttaaggagttggagattaatccaccaaattttctgtaagtctgaagttatgccaaatataaaggttaaatttagataacaagctaaaaatgtttaaaggttagaaaaacaagaaaacccactaatacattcatgtgaaattgagcaatataaaattgtccatatttcaatgatttttgacccatataaacagctctttcttgtgattcaacctacagattctcttccttttagttgtagcttttatttttcttgtgtaattgcattggcttgtactcccagaaaaaaaactacttgacagtggacgtcctcaccttggcactgattttgatgtgttttttcccccacaatttatacatttcctcatttgatctattagtatagcaattaacagacttggcaatattgaaccattgctctgtctcaggcataagtcacctttgttgcagtgtaggttaaaaacatgggctgggagcggtggctcacacctgtaatcccagcactttgggaggccgggtgggcggatcacctaagctcaggagttcgagaccagcctggccaacatggtgtaaccccgtctctactaaaaatacaaaaatcagctgggcgtagtggtgggggcctgtaatcccagctacctgggaggctgaggcaggagaattgcttgaacctgggaggtgaaggttgcagtgagcccaaattgtgccactgcactccagcctgggcgacaacagcaaaactccatctcaaaaccaaaccaaaacaaacatgttacttggttctttttgtttaaattccatctgggagttttgtacccttctcacagggttagggatttgcggttttcctattgtgccacctttgtcagcttttgttgtcaaatcagctccctatcatgagtccaatcacccattttacagatagggtaaactgaaacccaaagagggaaagtgaccctttccggtttttcctgagccagggctagacctccagtcctcatatctgtgggatgacggcaacattgttgttagaggggacttcaaatcccagctaagcactagctcactgcatgatcacttgggcctcagtttccctgtctgtagaataagcactttacatggtgggggagagagggctgaggcacctttctgtgcagtttccgttcaggacgtctccagggtctaaagctgagtgtcgcatccagcgtgggggtgcctctatacacgtccccgcagaccccccccccatatgtgtcctccaggccgacgcccccttccggcagggggccgactcaccctcgtgcgcgccgcgccggccgccggcagcccccggagggtccggagcgagagcgcgagcgagggctgggccggggtcgggaccccgagcggggacgcggccggggcactctgcgctgtgggctcatctcggcttccaggacgttactgccgggaagggggaagggggctgtcagcctctggacccctgtccccagacatcgccagccctcatccgccagagcgtccctttgctgggaactccatccccagagatccccatctcccagggtttcccgctccccaggatccggcatccgttctcgacccccagccattcccgggacgcctccctagagactcccagctacatccccagaagctctgtccccctaccaccagcctctccctcgatactcccttttccttgctcccttctcttccgttccccgtccctctcggggctcccaccgacgctggatcctggggacctaagtttctagaatgcccgccccagcctggaatcccaagagagtccactcccttctccatccttaggttccaattccaggatccccctattaaatcaacaatgccccccccccaccacaattccacgcccaaagtaatgattggccgaaagaatgcagccctgcgcaagcattggtcgcgccctccccgtccatccgaccccgccctcgggccagcccctcactcacaggcgttcgcgcagcgccgcctcccgggccgcacaggcttcgccctcggcctccgccacgcctgcgcgccgcagagcctcgtccagccgccgcgtagactccgtggccgccgcctcccagcgcgccagggcctctgggggcgcagggagccgggtcaggctggagactcccgcgcccacccgccccacgcacgccggaatccaagttgatagtctgcatgccgtttgcacgctttcctttatttgaattaaattagtgtgtaccattgcatggcttccacgtgccatttgcatagcttttcataggtttgcattgctttcgtgagtcgtttacaaggagtttgcatgttttgtggcatttgccttgtttttgtgacatttgcatggcctctgcatgttgtttgcattcttttcataagtttttgcgtttatatccgtgttatttgcattacgtttgcaactgtgcttgtttggataactaggattcacctaggctcctcccacttctatccctgcccactcccttacaccccaacgcacctgtcagcgccccgttctcggcccccatctgggtcccctgtgccttggcttcgtccatctcaatcttcagtgtcgttagttgggtctgaagccggctctgaggagtggaggggaagtgggagggggtgtaggcagaggagaggaggagtgattcggcctggcccttttggggacagtgagaagccacctgcgaccctgtgtcctgagctttgtgtggaatgtcctttggggccttgtagttgtaaaatacagaagtggcttctgaagcctggggcaccgagtggtgacagctgcctgcctggagggagatctctgcccaggtccaacgccaccaaccctaagccaccagaaagtggagagtgctgagctctgcggtcagattcaagttccactttcagctccatctgggactagctgatgggatttcaaaccaacaaagttagccgggcgtcgtggctcacgcctgtaatctcagcactttgggagaccgaggcaggcggatcacttgaggccaggagttcgagactagcctggccaacatggtgaaaacccatctctacttaaaaaaaaaaaaaaaatagcagtgtgtggtggtgggcgcctgtaatcccagctcctcaggaggctgagacaggagaatcgcttgaacctgggaggtggaggttgcagtgagctattgtgccactgcactccagcctggacaaaagagcatgactccgtctcagaacaaacaaacccagcaacaacaaaaaccaacacagggcaatttgatggttgacaatgattgaatttttggggtatgtgtcggttgcctgtgtaggacattctgcaaaacgactggttcggcttcctcagtgcgtcttacagcaagggggcagagccagaacctgtacttggagtaggatcctcttaacctcgactgccccagtcccttctcttggtccagggggcagaaaaggggtaggggtttatttggatttatttatttattttgagatggggtcttgctctgtcgcccaggcgggagtgcagtggtgggatctcagctcactgcaacctccgcctgggattacaagcatgcgccatcacacctggctaatttttgtatttttagtagagacgggttttcaccacattggccaggctggtctcgaactcttgacctcaactgatacactcgccctggcttccaaaagtgctaggattacaggcgtgagccactgcgcccggccccattttgatttttaatattcagatgctgcactacctcggctgggctgggaggttggggtggaatggggggtgtgcacagaggtatacagtagtcactccataaatggaaatggctgggattttaaggacagttcttttggcaggctcagggctggaaaaggttaagaaaaagtctgaagggttagtcagaggaaaaggaggacccagcaggtacctcccccaagaggccaactttagcctcctaattacaggtgacatgtatgtccctctctcaaaatagggctgctggaaactggctggagtggggctgagttggcacatggaggagggcctccagtggtctggcgtttctccagacaccatttatctggcaaatagcaaaggacagtgagacttttttttttttttttttttttttttttttcagatggagtctcgctgtgtcacccaggctggagtgcagtggcgcggtctcagctcactgcaacctccaccttccgggttcaagcgattctcccgcgttagcctcctgaggagctgggattacaggcgttcaccatcacgccaggctaatttttgtatttttagtagagacagggtttcaccatattggccaggctggtctcgaactcctgacctcaggtgatccacctttctgatcagaaggtagactccatggtgagctgacatctaagggttggaaggcattagggcgctattctcaataccctctcaattcgaggaactggggaaaccgaggcacagggagggaaccctggagttgtgtgggcaggccgtctcttatctcaacattctggattcccgagctccccctctacccggcccacctacctggcggccttcacaggcctttaatgccttctccaactcgtgccggatactttccgcctggtccagctgcctggctagggcctcctcccgctcggcagcctctgccagccggcgccgcaggtcgtcgaccccaggcggcgggtccccgggcggcgccgtggcattggcccctggctccgggcagcgaggtccccgagcagccgaggcggccagattccaggctaccagggccccgccggctgctgccgcagccaggaacacggccaccccgcacagggcgagcacccgccaggcacgcccgggctccggccccggctcggccatgccgcggtccacagctctggccccagacggccacgaatatttaattggcaccttggggcgccagggacacccacggttccgcccagcctggccgtggcttcccaggccgttgggaggggttggaccccctccaggggctggtccatcccgtcgagcccaagaaaggactaggggttctgggttcctgcatcccacgtgctgccctctgtgcctcaatttccccctttgtgaaatggggagagtattaactcctgcttggtagggcttggtaggaatcaagctggcacatctgtaggaagcgccaaagaccgcatctgcaaacgaagtgcttggctatcatttggggatatgtcgtttccaatattttttaatcttaattttgtgtgtttgtgtcgcccaagctggagtgcaatggcacaatcttggctcactgaaacctccgtctctggttgaagcgattctcctgcctcagcctcctgagtagctgggattacaggcgactgccatcacgcccagctaatttttatatttttagtagacacggggtttcaccatgttggccaggctggtctcgaactcctgacctcaaatgatctgcccacctcggcttcccaaagtgctgagattacaggcgtgagcccccgcgcccggctaattttaattttttttgtttgattgtttttttgagacagggtctcgctatgttgcccaggctggtcttgaactcctgggctcaagcgatcctcccgccttggtctcccaaagtgctgggattaaaggcgtgagccaccgcatccggcctgtggttcccattctgttgacggggtaaccgcattgggagatgggaggatactccactgacttacggttggcagagtttaggctgccacgccggctgtgaagaggaccggagggtagacaacagggtggaccggccccgtcttcccgcctgctcgccactgggcagccagagggcgatcttacaacgtgattacaattgggctctggctccccttccctcttagaatacaacccgttctcccctccccttccttcctcctactctccctcctccccctcctccctcctcttcctgtttctccttctctatctccccctgccccttctctccctccttacaccttcaaggacctgatcacacctttaaggtcattttcttttcactccttcctgtagcctccccaaggttcttccaccaagtgcattcccatcgcagggcctttacaccttctcctcctctgcctggctaattgctgctctgctaacaggtcccctcctacagaaagtccccctcttcaacactacctccttttgatcagctcctagggccctaacattaaaaaggtaatggcaggccgggcgcaatgggtcacgtctgtaatcccagcactttgggatgccgaggcgggtggatcacctgaagtcaggagttcgagaccagcctggccaacatgatgaaacctcatctcttttaaaaacacaaaaattagtcgggtgtggtggcgggcgcctgtaatcccagctacctgggaggctgaggcaggagaatgggttcaacccaggagggggaggttgcagtgagctgaaatcatgccattgcactccagcctgggcgacaagagcaagactctgtcttaaaaaaaaaaaaaattagccaggtgtggtggctggcgcctttaatcccagctactcaggagggtgaggcaggataatctcttgaactcgggaggtggaggttgcagtgagcagagatcgtgccactgcactccagcctgggtgacagagtgagactctgtctcaaaaaaaaaaaaaagtaattatatatttatgcgtgtgactgattctcccccccacccccgcctttcccatcaaactgggtgatcttccccttcaccctctgaaggttccttgaaaaatcaactcacaaaaggaagattaataggagaaatgaggcagaggtgggaggatcactttagcccgggagtttcagaccagcctgggtaacacggtgagaccccatcgctacaaaaaaaaaaaaaaaaaatgagcctgatgtggtggtgtgcacctgtagtcctagctactcaggaggctgaggcagaagtatcgcctgagtccaggaaatggaggctgcagtgagccgagatcgcaccactgcactccagcctgggcaacagagtgagaccatgtctcaaaaaacaaaaaaaagtctattcaggtatgttgatagactttagtctttctgcctgtgatatgagttcagttaatgaaaactcaaagaatcagaagtaattgttttcttttttggtgggtccagaatttaggcgtgtaaaaaataaaataaaattttaggaccttccagatttattatgtcaaggggtaatagttaagccctggaaactgaatcaacctttctttcttttcttgtattcattcattcattctttctttctttctttcttttttttttttttttttgagatggagtcttgctctgtcgcccaggctggaatgcaatgttggctcactgcaacctctgcctcctgggttcaagcaattctcctgcctcagcctcctgagtagctgggattgcaggcacctgccaccactcctagctaattttttttttttttgagatggcgtcttgctctgttgccaaggctggagtgcaatgtcacgatctcagcccactgcaacctctgccttccaggttcaagagattctcctgcctcagcctcccaagtagctgggattacaggcacctgccaacacacctagctaacttttatatttttagtagagatgggatttcactatgttggccaggctgtctcgaactcatggccccaagtgatctgcccacctcggcctcccaaagtgctgggattacaggggtgagccaccacgcctggcctctttattttttcttttcttttttttttgagaccaggtctcactctgtcacccaggctggagtacagtggtgccatcacggctcactgcagccttgacctcctgggctcaagcgatgcccccacctgggcctccagcgatgccccaacttgggcctccctgaatgctgggattaccaccactgtgagcaccgagccaccccattcccaacccctggcctttcttgtgtggagatatcccacattaactagacttcctagtcttcattcaagcatagactaaatgttgttggagatagagacccttgtgactgtcacctctttacaacagaatgtgtaagcaacccccttaggacatagtcaatagtagccaatctaatctcctatctgtattctagcctttgcatgggaaatgtatttctgttcagcacctctgtttgtggctttataaaggatccaggccaggcgagctggctcatgcctgtaatcccagcactttgggaggccgaggcgggcgaatcacgaggccaggagttcgaggccagcctgacccacatgtcgaaaccctgtctctaccaaaaatacaaaaattagccgggcgtgatggcgggcacctgtaatcccagctactcgggagactgagacggagaatcgcttgaacccgggaggcagaggttgcagcgagtcgagatcatgccattgcactccagcctgggtgacaagagcaagactccatctcaaacaaacaaacaaacaaacaatccacacttttccctgaatgagaggcactcatcctcattctttggtgtccctgtggccctggatagactctgccctcacactttgccctggaaaaaactcttttaaccaggcttggcatggtggctcacatctgtaacccaagcactttgggagactgaggtgggaggatcacttgagcccaggagtttgagatcagcctgggcaaaatggtgagaccccatctctacaaaatataaaaaaaattagggccgggcatggtggctcatgcctgtaatcccagaactttgggaggccgaggcaggtggatcacctgaggtcaggagtttgtgaccagcctggccaacgggtgaaaccccatcttaactaaaaatacaaaaattggccagcgcaatggctcatgcctgtaatcccagcactttgggaggccaaggagggtggatcacgacatcaagagtttgagaccagcctggcaaacatggtgaaaccccatctctactaaaaatacaaaaattagctgtgtgtggtggcgggtatctgtagtcccagctactcgggaggctgagctgagatcgtgccactgcacaccagcctgggcgacaaagcgagactctgtctcaaaaagaaaaaaaaaatttagccaggcatggtggtgggtatctgtaatcccagctactcgggaggctgaggcaagagaattgcttgaacccaagaaggggaggttgcagtgagccgagatcatgccattgcactctaacctgggtgacaagagtgaaactctgtctaaaaaaaaaaaaaaagaaaaagaaatgagctgtgtctggacgtgtggacgtggctcactcacgcttgtaatcctggcactttgggaggccaaggcaggaggattacttaaggccaagcattcaagatcaacctggccaacatagtgagatcctgtctttattatttaaaaaaaaaaaaaatttgctgggcatggtggtgcatacctgtggtcccagctactcaagaggctgaggtgtgaggattgctggagcccaggggattgaggctgcagtgatccaaggtcgcaccactgcacttaagcctgggtgacagagagaggccctgtctcaaaaaaaaaaaaagaaagaaatcagagctcagagaggtcgagtcccagagcagggacactcagcagtggctggtcactgccaaattcccactggggactgcagaaccccacagccgtcagcttctcaacccctgggtgggtcacagccttggagtcaggtctctcaggaaaaggacaaaatagggagggaagatgggacattttaggaagtagggaaatttacacccaggccattgtgtggggggattgggagttgaatccacaatattgggctaatcttatcagcaaaatacagcccaggcaggatgggggtgggggttgtggggggagagtgggggagggagtgtgagtaggggtgggggtgggtggagcagcagcatagtctggggacctttccatggcccaagtcgggagtggtgagtggaggaggtcacgtggggagcgtttgtttcctgggcaaaaggaaatccacagaatgtggagggttaattgcccaacgagctttgaaaccctgaacaaggccaggcatggtggctcacgcctgtaatcccagcactttgggaggctgaggcgggcggatcacgaggtcaggagatcaagaccatcctggctaacacggtgacaccccgtctctactaaaaatacaaaaaaaattagcccagcgtggtggtgggcgcctgtagtcccagctacttgggaggctgaggcaggagaatcacttgaatccaggaggtggaggttgcaatgagctgagatcgcaccattgcactccagcctgggcaacagagcaagactccatctcaaaaaacaaacaaaccaaccacaaaaaaaacaaaaacccctgaaaaagtccagtaattaccctaggcctcaccggggctgttggtgaggatgaaatagcttagtagttgcaaagcggctttggcttttttgcaagccagggccacagaagtgaaggcccaccctgctcccggggacacttagcaacatatagagactttttttttcttttgagacagagtctggctctgttgcccaggctggagttgcatcatcttggctcactgcagccttgacatcccaggctcaagcgatcctcctgcctcagcctcccaagtagctgcgactacaggcgtgtgccaccatgcccagctaattattaaattttttgtagagatggaggtctccctatgttgcccaggctggtcttgacctcctgggctgaagcaatcctcccccttcgacctcccaaagtgctgggattacaggcatgagccaccatgcccagcctggaaacatttttaattgtcacaacttgggagggtgttacttgcatttatgggtgggggccagggatgccgtttaatatcctacaatgcagctgggcgccgtgtctcatgtctgtaattccagcactttgggaggccgaggcgggtggatttcttcaggtcaggagttcaagaccagcctgaacaacatggtgaaacaccgtttctactaaaaatacaaaaattagccggacatgatggcgggtgcctgtaatcccagctactcgggaggctgaggcaggataatcacttgaacccgggagacggagtttgcagtgagctgaaatcgcaccactgcactccagcctgggagacagagtgagactccatctcaaaaaaacaaacaaaaaaaacccaaaacaaaaaacaaaatcctacaatgcacaggatggtccccacccagagaaccatccagcccaaaccaccaatgctgctgaggctgagaccctgccctagaccttgggagtgaggaacgggtgctccaggcagcaggcagagcttgggcaaaggccttgaggcaaaaaggaacttgggatcagtaaaggtggaggtggtgagcaaggggaagtgagggggcaagagggccagggggtctgtggcaggggaggtatttggggacccttccctgggacagcagtaggaaccatggaagtggaggcctggttttatttatttatttatttttgagacagactcttgctctgtcgcccaggctagagtgcagtagcgtgatctcagctcactgcaacctccacctcctgggttcaagcgattttcctgcctcagcctcctgtgtagctgggactataggcacgacccaccaccccccgctaattttttttattttgagacagagtctcgctctattgcccaggcaggagtgcagtggcgggatctcggctcactgcaacatccgcctctcgggttcaagcgattctcgtgcctcagcctcctgagtaactgggactacaggtgcatgccaccacgccaggctaattttttgtatttttagtagagacagggtttcaccgtgttcgccaggatggtctggatctcttgaccttgtgatccaacaaccttggcctcccaaagtgctgggattacaggcatgaaccaccacgcccagccatttttttgtatttttagtagagatggggttcaccatgttggccaggttggtcttgaactgagctcaagtgatccacctgcctcggcctcccaaagttctgggattacaggcgtgagccactgtgcctggccagagggttttttttttttttaaatcccactgaccgtctgggctggggactgtgggaccttaggatagtacagaaatctgggacaagggactcctggctccattaccacaaacaggagttggagttgcagagacaatggccgggattccgggagaacttggaggaagtaagataacagagaaggaagggactatggcatctttgaggatcgaataaggtaggtgaagggtccgtcgggattgcagccctcaattgtggagaagcagagagactctctgggggaggggttcccagagctgggtactgcagaatgaataagagtttggggaatcgggccaggtgtgatggctcatgcctgtaatcccagcactttaggagcccaaggtgggtagatcccttgaggtcaggagtttgaggccagcctggccaacatgatgaaacccctgtctccactaaaaatacaaaaattagccaggtgtggtggtgtagtactgtaatcccagctactcgggaggctgaggcaggagaatcacttgaacctggaaggcagaagttgcagtgagccaagatcgtgccactctactccagcctgggcgacagagcaaaactctgtctcaaaaaaaaaaaaaaaaaagagccgggggtggtggctcatgcctgtaatcccagcactttgggaggccaaggcaggcagatcacctggggtcgagagttcgagactagcctgaccaacatggagaaaccccgtctttactaaaaatacaaaattagccgggcatggtggcgcaagcctgtagtcccagctacttgggaggctgaggcaggagaatcgcttgaacccgggaggcggaggttgcggtgagccgagactgcgccatcgcactccagcctgggaaacaagagcgaaactccgtctcaaaaaaaaaaaaaaaaaaaaaaaaaagagagagagagagagaatctgggggatgaagcagggggaaacattctgacaatgcatggcctgtgtgtgtgtacagatcccagtttaaatcccagcccagcattttctgcaggcgggaagggaagcaagacaaggttactctcagttacagcctcagtttcctcactggatccccaggaatcaggagaggctctagggaggagatgagaatacaacacctgggaaacggtgagccctgatgagggtgcatagttcttatgttgatcccagcagagacaagggctgggaagaactggggtggtgcctccccgaactccgtgggctcctgaaaacgtcctggagcagggaagggaggtgtcatcgtcaacggggtgtccactctcacctgcaggggcggccccaacgcttgggtactaaaacgatgatactccaggaactcgagagtcaggtgtgctctccctcaaaggaagtgtttattttttggagctcaaagaccccagaaaaaagcaaccccccccgcaaaaaaaacccataacaacaggcagcacatgccccccacaccgcaccccatgcccaatctcagggtgggagacaagaggggggactcattgtccggagggaggctctggagggagacagccctgggtcaacccgactgtgtccccacacccaggacttccccatggcccctccagacctgctccagaggcccttctccggctaccccgtgctctccccgctaaccgtgttgccccatgacccgctcagaactgatgagatcaagggaatgttcaagcgaaaagccgagcaggacggaccttccaagatgtgcctaaaggaccagaagagggactcagggcagactggaggcagcagacactggccccgctccaagcccggccccaagccccgcccccatcgctagacccgccccacccatccataagcccctcccctccatcgatagacccgcccccattgatagccccgccccatacagctatcagcccgtccccgatccagggcatccttctcactggattctccctccttccccaaggcccctcacctctgcgcccagtcccttcccctgcagcctctctctctagacttcggagcctctgcttccccgccccgcttccccagctttcttctccctcccggggccgccccctcctcactgaccagcttcctgggatctcactgcagcagagcgctgaggcccagcagcacaatcagcagctggggcgccgcagcggagctggagtcctgggagctggggtagtacttcttgtccgcgattctcacgcttaagacctggttttctcttctgcggtacagatggcaaatcaggcatctgctcgtcctggctcctgccgccctccctgtaagcccaccgcccccgggagttccccccgcaccgccccaatccaagtcaccggggagggaatggacagcggccacccatggctctgtgaccctaggggctaagttatccttttgtgggactcaaactttatcccttggggcaatggggattttgggagcaaaggagatcctgggtcttgggctagggatgtgggggtgagaggaatgtggcaggtggagggtagcgggggaaggctatctctgacctcagtcgctccacctctgcagacgcgtcctgaagcttatggtttaatgtagtgatctctcctggtagggtgggaggacagaaacagggggcgggtcagcatgtggccatgctggggccctgctccactctgggacagaacctcccccttaccccaacctccagccctggtctccctgcccccaccccctcttccatacctgactcacccctccccggccctctcccttctccctttctcaccctcaagctcctccactttcttttgtccttgggccttctctgcatccagggaagccattagggccatctaagaagagttagaatctggggttttggcctggggagtttggctgctgcccctgggacctgggcctcctccctaggtcctggggacagaggggcttaaatgcaaacccctttcaggttttcttccaaccctctctgcaccatggtctccaaccttaaagaacagccacaaccacacactctcccagggccacccataagcatgtgggtcctcaaaatgggagttttgaggccaccccacgtggaaacttggaggctatcgataaccaaagtttagtggacatttccagattgcctgagcaatggcccaagaaaagttagagggccctaccaaatccagaatgcagtgggatttccccgcccaagtgacatgcccagcgagagtttcaagatcccccatatcaggacccaggtgaatatttcagtttcttagggatgaagtgaaaatttcaaaagccccctttttcagggtctggtgaggtcccccttcaaccctgaatagggatttctactcccccaggactggtgcccacgaggagtttcaaggcccccgacaccagtgccctggaaagaatttataaattcacctaagtcccagggggatactgaggtccccgatttgggggatctggagagttttaacaccctgcccctacaccagtgccctggactgggttaggggcccacaaaccctggtaggggaacctaggtcccttgatgtgggggcccaggagcagtttcaggacctcccctgcatctccctggagacccaccctgggtcagatttctggggagagattcttgtccctcccaccgcctagtactaggccatccaaaggagttgaggagcttaccacagtgtggttgcaggtggcggcctgggcctccacatcctgaaagcccttctgggcctcggtcagctcttgttgcaggagatgggtgacattgcgacactccatcactgcccgaaggccgtcccggcaggcctcgctgttggccttgatggtgaagataatcaagggcacccccagaatcacgatgatcaggagcaccagaattcctatccccagcagaagcttacagcgcttatccccgtcttccatgggcactctgcaatagtcatacgaagtagatgccatccagatctcccctttagagtctggcctggagttaggggagggtgctggaatcttctacgggccacccctttattagcataggaaacgtcctgaccaatagcaagttccaggaagtgctctgaccagcagctcttgcatgaggcacctacaggcagaggattaattaggttttcagtttcagtttcccagaaaggaggtgggcttttttttcaccctgctttaaaagcccttgggcccttcccagctgggtgccagccaactgtggctgcctgggacactccatcttaagtccctgtgcctctgctgtgtgttactgagtgcctaggccgtgccagcctgtattcatctgtactatgacctgaagaggcagaggccatcactgttggtccggtctccacctggggaaactgaggttgcacagttgcgtggtggagtgagggcagggcctgggtctgggggcggggcctgggtctgaccccagggactggtttttgtgttcaggtgtctctgtggtgacgagcagggcttcatccagtgcctctgtccccaccgaggggactatgggagacatggagggtgtgtgagcaacaggtgagactggagccagctgaaaactgggagaccgacccagccaacaaacaatgtcggtctctgtcttggcacctgcaggaaacaagctcctacttccagaaaaagtgctcctgggactccaggataccaggtaaactctctgagcctgtttcttcatctgcaaaggggaataacagggccagcctcagacactgtccatgtggccaagagagccagggcttcctacaggaaatcaggcccattatcggcacccaactgctgggcatgaccgctgaaaggggactgcatgtttttcttgtggcttcttcagccacatcctgaccacagcccagattctgttaggtctgccatttccatgtttttttttcttttcagcagggccagacagtaggcgaggtcaagtccagagcccaggcctcccagaaggcctggggaactccccccaggccctgactccaacatccctcagaaggaccccattaaagccacttagagccaggcatggtggtacatgcctgtggtcccaggctgaggctgggaggctgaggcaggaggatcactcgagcccaggagtttgaggctgcagcgagctatgattgtgccacggcactcaagcctgggtgatagagtgggatcccatctcttaaaccaataaacaaaaaaatcacttagaaccaagaaccaattaacaagctgtgggagatgatcttgctgaaaattctgagggtgaacttgtcccaggaggagggacctaccagcctggccaggactccaggtgcaaagacacgacctttgcctgacttatttgactaagctgacttatttgagcagcactgttctggcctgctaactttagggttagtttgggaccaggtcggaaatcacaattgcatgaattgcacattggaggccagggtggtgcacctctgggcaaatgaatttcctctcttagcattgatttccccagctgtaaaatgtggataataatagattgatgtcctctctaaattttgcagctgtaaacagtcccagccctgcaaaccgaaagtttgttgctcttccctttaaaattactgtagggaccagccccacagggtcagtgggtctctccctgtgtgcggcgacgagagagtgtagaaataaagacacaagacgaagagataaaagaaaagacagctgggcccgggggaccactaccagcaatgcgcggagactggtagtggccccgaatgtctggctgtgctgttatttattggatacaaagcaaaaggggcagggtaaagagtgtgagtcatctccaatgataggtaaggtcacgtgggtcacgtgtccactggacagggggcccttccctgcctggcagccgaggcagagagagagagaggggacagacagaaagacagcttatgccattatttctgcatatcagagacttttagtactttcactaaatgactactgctatctagaaggcagagccaggtgtacaggatggaacatgaaggcggactaggagcgtgaccactgaagcacagcatcacagggagacggttaggctgccagataaccgcgggcgagcctgactgatgtcaggccctccacaagaggtggaggagcagagtcttctccaaactcccccagggaaaaggagcctccctttcccggtctgctaagtagtgggtgttgttccttgacacttttcgctaccgctagaccactgtccgctcgggcaacgggcgtcttcccagacgctggcgtcaccgctagaccaaggagcccttctgctggccctgtccgggcataacagaaggcttgcactcttgtcttctggtcacacctcactatgtcccctcagctcctatctctgtatggcctggtttttcctaggttatgattgtagaccgaggattattatactattgggataaagagtaattactacaaactaatgattaatgatattcatatatctctaagatctatatttggtataactattcttgttttatattttattatactggaacagctcgtgtcctcagtctcttgccttggcacctgggtggcttgccgcccacaattacaaatggtgggatgggtgcagtggctcatgcctgcaatcctagtactttgggaggctgagatgggaagattgcttgaggccagtagttcgagaccagcctggtcaacatagagagatcctatccctatttaaaaataaatatatatatatattttaagtacatatatttattttattttgttttaattaattaattaattaattaattttttttgagatggagtctcgctcttgttgcccaggctggagtgcagtggcacgatcttggctcactgcaacctctgcctccggagttcaagcgattcccctgcctcagcctcctgagtagctgggattacaggcgcccaccgccatgcctggcttatttttgtacttttagtagagacagggttttgccatgttgaccaggctggtcttgaactcctgacctcaggtgatctgtctgactcagcctcccaaagtgctgggattacaggcgtgagccactgcacctggcctatattttattttatatttttaaatatataatgtatttttatatattggttggtgcaaaagtaattgcggtttctgccattacttttttttttttttttttgagagggaatctctctctgtcgcccaggctggagtgcagtggtacgatctcgatcactacaacctctgcctcctgggttgaagcgattctcctgcctcagcctcctgagtagctgggactacagatgcctgccaccatgcctggctactttttgcatttttagtagagatggggtttcgccatgttggccaggctggtctcaaacttctgacctcaggtgatccacccaacttggactcaccaagtactgggattacaagcgtgagccaccgtgcccggcctatattttattttatatttttaaatatattctccctctgtcacccaggctggagtgcagtggtgtaatctcggctcactgcaacctctgcctcctgggttgaagtgattcttctgcctcagcctcctgagtagctgggactacagatgcctgccaccatgcccagctactttttgtatttttaggagagacggggtttcgacatgttggccaggctggtctcgaactcccgacctcaagggatccacccgacttggcctcccaaagtgctgggattacaggcatgagccaccgctcccagcctctgccattacttttttttttttttttttttttttgagatggaatttcactcttgttacccagggtggagtgcaatgatgcaatcttagctcaccacaacctctgcctcctgggttcaaacaattctcctgcctcagcctccctagtagctgggattacaggcatgcgccaccatgcccggctaattttgtatttttagtagagaggtttaggtttctccatgttggccaggctggtctcaaactcccgacctcaggtgatctgcccgcctcggcctcccaaattgctggggttacaggcttgagccaccgcacccagcctttttttgtttttttctttgagatggagtctcggtctgtctctcaggctggggtgcattggcacgatctcgtctcactgcaacctctgacctccgcctcctgggttcaagcaatcctgctgcctcagtctcctgagtagctgggattacaggtacccgccaccacgcccagctaatttttgtatttttagtagagacggggtttcaccatgttacccaggctggtctcgaactcctgacctcatgatccgtccatctcggcctcccaaagtactgcgattacagccatgagccaccacgcccggccttccattacttttaatggcattaattaattatgcttactaaaagttatggcagaaaccacaattactttcgcaataaaattagaaatggaaactgttatgctaccattctttttctttttttattttcttttgagacagaatcttgtcctgttgcccaggctggagcgcagtggtgcaatcatagctcactgcagccttgacctcctgggctcaagcaatcctctcacctcagcctctggcgtagctgggactatatgtgtgcaccaccacgcccagctaattttttattttttgtagagatgggggtctcagtatgtttcccaggctggtctcaaactcctaggctccaaagatcctcctgcctcagcccccgcaaagtgttggaattacaggagtaagccactgcacccagccgctagcattcttttggttttagcttcatatatatatatatatatatatatatatatatacacacacacatatatatatacacacacatatatatacatatatatacatatatatatacacacatatatatatacacatatatatatataattattattattttagagaaacatttcagttgggagcagtggttcatgcctgtaatcccagcactttggaggctgaggcgggtggatgacctgacgtcaggagttcgagaccagcctggccaacatggtgaaaccctgtctctactaaaaatacaaaaactagccaggcgtagtggcaggtgcctgtaatcccagctactcagaaggctgaggcagaagaatcgcttgaacccagaggcagaggttgcagtgcagtgagatcgcgccactgcacttcagcctgggcgacagagtgagactctgtctcaaaaaaaaaaaaaaagaaaagaaacattttattttattttattttatttatttatttttgagacagagtctcactctgtcacctaggctggagtgcagtggcgcgatctccactcactgcaacctccaactccctgattcaagcaattctcctgcctcagcctcccaagtagctgggattacaggcatgcgccactacgcccagctaatttttgtattttagtagagacagggtttcaccatgttggccaggatggtctcgatctcctgacctcgtgatctgcccacctcagcctcccaaagttctgggattacaggcgtgagccaccgtgcccggccaacattttattttagaatagttttagatttgcagaaaaaaaacagtgaggataatagaatttcccacattccctacacccaatttcccctcttttatttatttattaaagacaggctcttgttctgtcgcccaggctggagtgcagtggtgtgatcatagctcactgcagcctttgacctcctgggctcaagcgatcctcccacctcagcctcccgagtagctgggaccacagatgctcagtaccacacctggctaatttttttactttttttgtagagatggggtctcactatgttgaccaggcttttctcaaactcctgggctcaagcgatcctcctgcctcagcctcctgagtagctgggactacagccactcaccaccatcacgcccagctaagttttgtattgtttgtagagacgggatctctgtatgttgcccaggctggtctcaaactcctgggctcatgtcatcctccttcctcagcctcccaaggtgctgggattataggtgtgaaccactgcacctggctaagaaaaaaaaaataggagcaaagatcatccgcaaccatccctcagctgtttcatttctgtttattacactacatgcatatttcacttactttgggatactgagatgtggccccggatgggcttctgaggacaactccatgcctgtaggaagtcgctggccccagggcgctcagcgggtgggggcgattctgctccaggggacatttttattgtcaccgcgggggctgggagtgccgctgccatctagggatgtaggccagggatgctgctcaacactacagtgtacaggacggccccccacagtaaatgatcaagccccaagtgtcagaggtgccaccagacgtgacaagccctgccctggggagaactgagtgcaggtttggagtcagacttgggctcaaattccatcatggcgaaccagctcctttccctcgggcctctgcttttctttctctctcttttgctctttctctctctctttcttttttgagatggagtctcactctgttgcccaggctggagtgcagtaatgcagtcttggctctctgcaacctctgtctccctggttcaagtgattgtcctgcctcagcctcccaagtaggtgggatcaaaggtgtgtgccaccacgcccggctaatttttgtatttttagtagagacggggtttcaccatgttggccaggctggtctcaaactcctggcttcaagtgttccacccgcctcagcctcccaaagtgctgggattacaggtgtgagccactgcccccagccaacctctgctttcttatagcgggggtgtgataacagctgcttcccagtcaattggaatgtccacacaaattagaaactgaaacagtatctccatcaactcagagaaaacagtaaaaagaaaataggcggtgagatttctcatcagttacattattctgactttaattagtgtccagggaaactgaaactatagctatacctaagataaacatttgaagaaggagtaaaggaaagattaattttgcagctgtctcagggtctggtggagggctgatggatgtcatcctgtctttgttttgcaccggggaaagtaagcttgtaatcagtgctgtcaggatgaaattcagcagactggttccgtggacaaggggtcacatagagcttgtaaacctaaggttacgtatctttgtttacgggaggctggacatcttggaaagatttaggagtaagcaaagaatttacgtatgaacaatttgtgagggtgatcatctggagatgtgtgagggctttttttttttttctttttgtaggcatctgggtaagctacaatgcttaaccacttaacacaatcaggaagcaacagccatgcattcgggaaaggaacttcagtgttgtgtggctcagtctccagacctaactttccctttggtacagacgcggtggtacatgcctgtaatcccaacacttaggcaggaggatcactcgagcccagaagatcaagactagtgtgagcaacaaagtgagtttccccccacccctcacctcaacaaaacatttaaaaattagctggacatggtggctgcgcctgtggtggctggagtgcagtggtgtgatcttggctcactgcagcctctgcattcaagcaattctcctgcctcagcctcctgagtagctgggattacaggcacctgccaccacgcctggctaatttttgtatttttagtagagaccgggtttcaccatgttggccaggctggtctccaactcctgacctcaggtgatctgccactcaggaggctgggtaggaggatcccttgagcccaaggggtaggagggtcccttgagcccaagagatcaaggatgcagtgagccatgttcgcatgactgcacacctgcctggacaacagatgagaccatgtctcaaaaacaaacaaaccaatacaaacaacaacaacttttcctttggcaaactgcctttggaaggtcctcatatttttattttctttgacaggaaaaagcaatatatagaaagtgcttagcttagcactttgtacattacagttccccatcatagtttgcccttgtcatttgataagttttggacttgactgcaggctttccttaaactgaactcccagaagtggggttactgggtccaaggggatgcctatgtcccaagctctcacttcccataaagaagaattcagaattcggccaggagtggtggctcacacctgtaatcccagcactttgggaggctgaggtgggtggatcacctgaggtcaggacttcgagaacagcctggacaaaatggtgaaaccctgtctctactgaaaatacaaaaattagatgggcttggtggtgggcacctgtaatctcagctacttggaaggctgaggcaggagaattgcttgaacccgggaggcggaggtcacagtgagccgagatcgcaccattgcactccagcgtgggctacagaacaagactctgtctcaaaaggaaaaaaaaaagaattcagaattcacctgtcgcctgctgctgcagtgaacagtgagtggcactcctctctcacacctatcacaggtattcttcttttccttccagatccttccctggcaccggttccaggaggacctcgttcttaggcagcatctgtgtctctgttttgtaagacacacagagtatccttaacccactgcagatatttccctgggtccatggtcaatcaacaccacctttcagtctccagcctcttaaccagcccagggctgagtgttgtttatagtattaatatgtttctggctgggctcagtggctcatgcctgtaatcccggcactatgggaggctgaggcaggcggatcacttgaggtcaggagttcaagaccagcctggccaacatagtaaaaccccgtctctactaaaaatacaaaaatgagccgggtgtggtggcgtgtgtctataatcccagctactcgggaggctgaggcaggagaattgcttgaacctgggaggtggaggctacagtgagctgagatcatgccactgcactccagcctgggcaagaaagtgagactccatctcaaaacaaagaaacaaacaaagtattaatatgttccccttgatcagtggggtggttcacccttgtaatcccagcactttgggaggcagaggctggcggatcgcttgagtccaggagttcgagaccagcctgggtgaactagcaaaaccctgcctgtactaaaaatacaaaaattaactgggcttggtggtgcgagcctgtaatcccagtggaggctgagacaggagaatccttttgtaatgcctgaccttgtttttttactaaccctattttaaccttgtttttactaaccctatttttaaattttccctttttgtctccttaattacctagccttgtttcccatatgagtagactctcccttagctgggaaagcctgacgaacgccatctggccccttgatttacaagacattaagggctacttacccaacccccttcctcaaagagttaacctgcgtaagcagatcctcagcatttcaaaggagcccaattagctgataaggtactggaacaaacaatgtacgaagttcccaggattttgctcaaaagcataacaacataaagccttgagtctgtgtctggcatagcatccatatctaactcttatgaaggatttagagcccggcacctggttccgttgctttttttgtaaccatttgtcttttaaattgtttatttctctgtaaccatttgttttttgattcttgcatgtttttacttctgtagaattattgcatttgagctccgctccccttccgaaccaaggtataaaagtaaatcaagccccttcctcggggccgagagaattttggaaagtcaagccttctcttggctgccggcttaaataaaggactcttaattcgtctcgaagtgtggcgttttctctaactcgcttgggtataacactttgagcctgcgaggcagagtttgcagtgagccgagatcacgccactgcactccagcctcggcaacaagagtgaaactccgtttcaaaaaacaaaaacaaaacaaaacaaaagaaccctcacaatcttcctgcacccaactgatgaaatcaccattgcaaaagttatatcagtgagaacattagaacagtaagctaagctaacccaaaccccaccttacttttcccttaattattcctgggctactgggtcgagctaactttggaagacatttaggctatggtttaaataacaggccttgccaaaaactcaaccacttatttttttgagacggagtcttgctctgtcgcccaggctggagtgcagtggtgtgatctgggctcactgcaatctctgcctctgggttcaagcaattctcctgcctcaacctcctgagtagctgggattacaggcgcatgccactgagtagctgggattacaggcgcatgccaccaagcctggctaatttttgtatttttagtagagacagggtttcaccatgttggtcagactggtctcgaactcctgaccttgtgatccacccacctcagcctcccaaagtgctgggattacaggcttgagccaccgtgcccagcctgctttttttttttttttttccttgagacagagtctcattctgtcacccaggctggagtgcagaggcaccatttctgctcactgaaacctccacttctggggctcaagcaattctcctctctcagcctcaggagtagctgggattacaggcgcctgccaccaagcctggctaattgttttgtatttttagtagagatggggtttcacccatgttggccaggctggtctccaactcctgacctcaagtgatccgtccaccttggcctcccaaagtgctggggtgacactgtgcctggtctcaaccaccctttttttttttttcctctgtcacccaagctggagtgcagtggcatgatcttggctcactgcaacttccgccttctgagttcaagcaattctcctgcctcagtgtccggagtagctgagacgacaggtgtgcaccaccaccccctgctaatgttttgtatttttagtagagatggggtttcaccatgttggccaggctggtttcgaactcctgacctccacccgccttggcctcccaaagtgctgggattacaggagtgagccatcactcctggcatagaaagtttttctcatccattgtcctcctcctcttctttcttcatcttcctcttccacttttttccaggcaactttagcaggaccctttgcaccgtcaaactttcctttcaacttacagtcagcaacctcttcctcatatttcttcttcagctttgccgccttagtgacgtcaacctgcttttcactgtcacttcagctattccacatctcacccagagctttttttttttttttttttttttttgccacatctccaatagagatgccagggtttgcggatttgatcttggggtggaattctgaacagaacatgaagaatccagacagttggttgggtgtgatggctcatgcttgtaatgccagcactttgggaagccaaggcaggtggatcacctgaggtcaggagtttgaggccagcttggccaacatggtgaaaccccatctctactaaaaatacaaaaattagccagacgtggtggtacgcgcctgtggtcccagctaatctggaggctgaggcaggagaatagcttgaacctgggaggcggggcttgcagtgagccgagattgcgccactgcactccagcctgggcaacagagcgagactccgtctcaaaaaaataaataaataaataaataaattttaaaaaataaaataaataaattaaataaaataaaaaataagagtccagacggtggccttttggggacattaggctctttcttcttgcttcccctttagctgctctataatccttcatttcccgatcctagtgtactttatccgcctttgccatttcatcaaatttggacttctctttcactgacactgtcttccaactctcagaatatttcttggaaaattctgcaaaattgacagggacctctgggtttttcttcttcttcttcctttttttttttttgagatggagtttcactctgtcgcccaggctggagtgcagtggcacgatctccgctcactgcaactttctcctcccaggttcaagcgattctcctgcctcaggctcccgagtagctgggactataggcgcctgccaccatgcccagataatttttgtatttttagtagagacggggtttcaccatgttggccaggatggtctcaatttattgacctcatgatccgcctgccttggcctcccaaagtgctgggattacaggcgtgagtcactgtgccaggccggtttttcttcttatgttcttctctgtacatctgcacaaaaaaactataagcagacattttgccctttggtttcttggggtcaccattagccatcctgactgtattgtttgctagtctgggcagcgcaggacacttgttcgctatttttctaaacttttcccccaatgggtgtaaaaaagcatattattattattattattattattattattattgagacgagtttcgctcttgttgcctaagctggagtgcaatggcgcgatctcagctcattgcaacctccacctcccgggttccagtgattctcctgcctcagcccccttagtagctgggattccagacgcgcaccaccacgcctggatagttttttgtacttttagtagaaacggggtttcaccatgttaggctggtctcaaactcctgacctcagatgatccgcccgcctcggcctcccaaagtgctgggattacaggtgtgaaccactgtgcccggcttaaaagcatattattatagtaaatactttttttccctttctttctttcattttaaacactggggtctccttatgttgtccaggctagattcaaactcctggactcaagcgatcctcccacctcagcctccctgttaccctgttgccatgacagccctgataaaataactgggaaagttctctttcttattgtaagtccaaaaaaaaaaaaaaaaaaggcacagctgcttaaagattgcagacagccagggatgtccccagaccttcttgacccctgaccagataccagaggaagataagatccctaaatcaccacaaactggaacagacgacctctagtcgactttagatcatcaatatataattataatgctaaaattccttctcttaaaagaaaatctccattttgtgtagatgggttgtatgaagacaacccaggaattgaggctcatgaattgagcctgcgtgtctggagtcccaccctgcacatgctagcattcctctcccttcctgtacccaggggaagaaacaataaaacgttatgctttttactgttgagggagaaggggcagttagagtgagagcctctccttctccattcctggccagtgaataaaacctgattgccttttccgattggatgttccttctttgccacctacacaaagtggggaggtaactcggtttgctggtggcatcctcagtagctgggactacaggcaataaattcttttatacgtcgctttttaaacgtattgtgcctgtgaacaaatcttcaagttatacccaagatttcaaagctcatgatggtccatagtactcgctctttaaatcaatagctgcgtatcccacagatgatttcctttgggatgatttcccagaactggaattgcagattcttcacaatgcatttttagtagagaaggggtttcaccacgttggccaggagggtctcgatctcttgacctcatgatccgcccgcctccgcctcccaaagtgccgggattacaggcgtcagccactgcgcgcggccacaaagctcccaacttttccgttaagcaccgagcttttttctagactagcagctgaggccggaaggaattctggggaacgtagtgcagacttgcagagaacgagtctcttggtcctgtgccgtagcatttccggcggaagttgctgggcgcggaaagccggcaagacctttttttccgccatcatcgctcacgcgcgcaaccctggcgacgcgtggtggcgaggctccgcctccccacgccattggccagcagctcctcgggcacgcgtatactgcgcttccgggcaatctccgccccccccccccgcatggccttctgggagttgtagttcggtcgcgagcgctgccgtcgggaggcgctccgaggttcgaggctgtgccccgcgaccccgccttcggcgctcggctcgcaggatggatcccgtacccgggacagactcggcgccgctggctggcctggcctggtcgtcggcctctgcacccccgccgcgggggttcagcgcggtgagcggcgtcgaggggcgggggtcgaatgggggaggcagtcgctgtggggtgggagtccggcgctgacccgcgtcctcccggtagatctcctgcaccgtcgagggggcacccgccagctttggcaagagcttcgcgcagaaatctggctacttcctgtgccttagttctctgggcagcctagaggtaagaggtgcccaccttcggaaccaccagggtctgcccacctcccctgcccattcacggtgccctatgccaggtgcgctgtccccgctgctagccaccctcgccgtgtcccccttccacccccagaacccgcaggagaacgtggtggccgatatccagatcgtggtggacaagagccccctgccgctgggcttctcccccgtctgcgaccccatggattccagtaagggctgcttcggaggcgagagttgtccgggtcccttgcagggaggagcgggggaggagggacgacgggcgcgcggtatctgagcctcggctgccccctggcacacggggtgatgacagggttggctgaggactcagagccctgccctagggtggaccgacatcccctgtcctgattcaaaatgtgtgatatgattggcacagcctgcatcctcgagttaagtgttcagtccacgccacctgtttcactactgttgtgctacttgtgtctttttacaccatagccaagcaaaaccactgcgcagttttctttttcatttccaggctttgcacacgccgcttcctctgcctggggcactttttctctcctttttgtagctcattctccgtcctccgtcagatgtcaccttcacccttccctacccctcctcttctgggcccacaaccctagtgcagccctcccagccccacctgaactttcccaccctttcttgtcatttttatttgactcaggctatattcattcatactagagttggcaaacctttttttttttttttttcttcagacggagtttcgctcttgttgcccaggctggagtgcaatggcgcgatctcagctcaccacaacctccgactcccgggttcaagcgattctcctgcctcatcctccagagtagctgggattacaggcatgcgccaccacgcctggctaattttgtatttttagtagagacggggtttctccatgttggtcaggctggtttcgaactcgtgacctcaggtgatccacctgcctgggcctcccaaagtgctgggattacaggcgtgagccaccgcacccggccaaactttttttctttattttttcttagagttggcaaacttttatgtaaagggccttatagtaaatattttaggctttacagggcagatgatgtgttttgcatattcaatttttttacaattccttaaaaatgtaaaaatcactcttaacacatcagctgtatgaaaccaggccttaggcttggtgtggtggttcacacctgtaatcccagcactttgggagcctgaggcgggcagatcacctgaggtcaggagttccagaccagcctggccaacatggtgaaaccctgtctctactaaaaatacaaaattagctgggcatggtggtgggcgcctgtagtcccagctacttgggaggctgaggcaagagaattgtttgaacctgggaggcggaggttggagtgagctgagattgcgccattgcactccagcctgggcgacagagtgagactctgtctcaaaaagaaaagaaaagaaaacagaccttgagccagatttggctcatgggtgctagttgtccaacctctataggattagagggctcatggaaagtaagttttgagggccacgatgggcacccagctctgtccgattccacagctagccaccccatgaatgcagcttcatatcaccaaagatcagcctactccagcggttcctaaaggctgcatggaatcccctccttcatctataccattcatgatttaaccactcctcccacccccatccccaatgttgtccatgtggctgccttaaacagcaccctggcgagcctcatcctagagtcatctttgggccttcccacccctgcctggcttccctctctcactcccctaccccccactcccagaggcctctgtgtccaagaagaaacgcatgtgtgtgaagctgttgcccctgggagccacggacacggctgtgtttgatgtccggctgagtgggaagaccaagacagtgcctggataccttcgaatagggtagggccaccccccagtgtctagccaccttccctgccctcccaactcatgatctcaccaatctgaccctcaaggacacccctgaggtctcctgttccttcttctaccttctgagcctcagattctgcatgttaaaaccgggacatatatatcatcttgtaggactgtcattaggagtcagtgacttggtgtctaaagtagacataacaggactgggcgcggtggctcacgcctgtaatcccagcactttgggaggctgaggcgggccgatcacaaggtcaggagatcgagaccatcctgactaacatgttgaaaccccatctctactgaaaatacaaaaaattagccgggtatggtggcacacgcctgtagtcccagctacttgggaggctgaggcaggaaaatcacttgaacctggaaggcggaggttgcagtgagttgagatcgcgccactgcactccagtctggggcgacagagcgagactccgtctcaaaaataaaataaaataaataaaaataaagtagacagaacggtgatttgaacccagcagtattagtttggtgtggtgcttcgggtgtgggtcaagatgctgaaacaaaaatcccccaaaagactgggcacggtggctcacgcctgtagtcccagcactttggaaggccaaggcgggcggatcacctgaggtcaggagttcgagaccagcctggccaacatggtgaaactccgtttctacttaaaaaaaaaaaaaaaaaaaaaaaattagctgggcatggttgcctgtaatcccagctaatccagaggctgaggcaggagaatcgtttgaacctgggaggtggagattgcagtgagtctagattgcgccattgcactccagcctgggcaacatgagcgaaactccgtccccaaaaaaaaaaaaaaaaaaaattcccccaaaagacagaggtcacctgcatgcccgggtcccccgccttctccaggggctatcctcaaccctggccccacaccgggccagcatccctcccaccttccctcctggtccagggacatgggcggctttgccatctggtgcaagaaggccaaggccccgaggccagtgcccaagccccgaggtctcagccgggacatgcagggcctctctctggatgcagccagccagccaaggtgagtcctcaggcaccggagtgggggtggccgttgtgggaggatgaggcttaacctgagtcatcccacctccagtaagggcggcctcctggagcggacagcgtcaaggctgggctctcgggcatccactctgcggaggaatgactccatctacgaggcctccagcctctatggcatctcaggtgagcacagagtggggaaactgaggcgtggaagtggagggtgtgactgtcttgagattacacaaccaggaaggatcttcctacttccctctcccaactctggattctgtaaagactgaaggagccaggctgtgcgggttgggcctctgtgggtggggtgggcagttccctacacctcacctcctcccctcgcacgtgtttttcagccatggatggggttcccttcacactccacccacgatttgagggcaagagctgcagccccctggtgagtcggggtctcagggagcctgggtctgcgcctgccatcaccattctgggtgccaggacatccctgtatccagtgccccagcacagagggccacatcctgggttggggctggagtgtgtcacctccaggtggcagctggaaggtcttcagtcttagaatggggagggatccatccagagaaagcagctggacaccagtagctagaggctgtgacaagaagggggagggatgctgggcatggtggctcacgactgtgatcccagcactttgggagaccaaggcaggtggatcacttgaggccaggagatcgagaccagcctggccaacatggtgaaacctcgtctctattgaaaatacaaaaattagccaggcgcggctttagagactttgtctctaaaaacaaaacaaaacaaacaagaaaaataagggggagggatgtccgagggaatattcggggagtgttggggggagggcaggaccccttgaagacgaaggaaagggggtttcaggttgagatcgggcccaaggctgacccacctctgcccgccaggccttctctgcttttggggacctgaccatcaagtctctggcggacattgaggaggaggtgggtgcagggctagggaggaggtgggtgcagggctagggaggaggtgcctgaggggccggcacccgcccctcgtccgccccaggctgtcccagttttccccatccccgctttgccccagacacacaccatctctccagggcagaagaccactcaagtccctaagtacccactctgccattcctcagtcactccccctttggccctctctttactctggcacctgttcactctctctctccccatcccccagtataactacggcttcgtggtggagaagaccgcggctgcccgcctgccccccagcgtctcatagtccctcacccttccgcggaaagagcccccttactccacctccccgccagcctggggccaccccccctcactgcatcctggggccacccccactcactgcatcctgggaaccttcgccctgcaaggcgtttgctatcttcagccactgggcggagctgcagccctggaggagggggcgggtcgaggctgcgtggtgatggggtctccgcccccacgccctgccgggcagggctggagctggacagaagccagtgcctttaagtcatttgtgtcaaaaccctctggggtccggaggctgtgcgggtgtcctcctggcaataaacactacccggttctcgccctctggagtcctgatcctgccgcctgtccacactaggcactcttgcaccgggcaagtgggtgaaatcatggcagggaggcggtgctgctgggtctcccgtttgttgttgttgttgttgttgttgtttgtttgtttttttctgagacgggggtctccctctgtgtcccaggctggggtacggtggcacgatctcggctcactgcaacctccgcctctggggttcaagcgattctcctgcctcagcctcccgagtggttgggattacaggcgtccgccactacgcccggctaattttttgtattttctatagacggggtttcactgtgttggccaggctggtcttgaactcctgacctcaggtgatccgcccgcctcggcctcccaaagtgctgggattatgggcgtgaaccatcgcgcctggcttgggtcttccattctacagagtgggaaacaggctcagggagtgagtgagtctggattctagatcatagagaagaccttgtcccggcccttcatcattgggcataataataaaacaagtactgtttctactgcagtggccacatccccaacacgcgatacaccattattacctcattcagtctccctacaacccactgggaagctcaggttttgttgccattttccagataaagaaactgagatggggatgctaaggccacaactgggactgaaacccagcaattgctgtcttttttcttttcttttcttttctttttttttttttgagacagagtcttgctctgtcacccaggctggagtgcagtggcgtgatctcggctcactgcaagctccacctcccaggttcacgccgttctctggcctcagcctcctgagtagctgggactacaggcacccaccaccacgcccggctaattttttatatttgtggtagagacagagtttcaccgtgctagccaggatggtctcgatctcctgagcttgtgctccaccctcctcggcctcccaaagtgctgggattacaggtgtaagccacagcgcccaggccttttttttttttctttctttttttttttgagacagcgcctcatgctgtcacccaggctgggtgaagtggcatgatctcgactcactgcaacctctgcctcccagattcaagtgattctcctgcctcagccggcaccccttgctgctgagtagctgggactacaggcttgggccaccataaccagctaatttgtattttgtatttttagtagagacagcgtttcaccttgttggccaggctggtctcaaagtcctgacctcaagtgatcccccgccttggcctcccaaagtgctaggattacaggtgtgagccactgcgcccggcccaggccacaccattttcatccaccaattcatacaaccttgttttatgtacatttgtttaaaaacaccttatttaatatctatggtggattcatttacattgaactcacagccaacagcaccgaaactcacgtctgcataaagcttctctataatggattttctccatgaggtgcatcacagacttttttttttttaagtattttatttttggcatgatcatagctcactgcagccttgacctcccgggctcaggtgatcctccaatctcagcctcctgagtagctgggactacaggctacactgggctaatttaaaattttttttgtactgatgggggtctcactatattgcccaggctggtcttgaactcctggccttgggcagtcctcctgcctcggctcccaatgtgctgggattacaggcatgagccgccgagcccagccattgcagccttttggtacttaggaagcctggacagcatttcggtgtctgggggaatttcaatggcaaaatcaccaacaaaaaccacaagaacatggccaggcacagtggctcatgcttgtaatcccagcactttgggaggccgaggtgggtggatcacctgaggtcaggagttcgagaccagcctggccaacatagtgaaaccccatctctaccaaaaatacagaattagccaggcttggtggcaggtgcctgttatcccagctacttgggacactgaggcagcagaatcgcttgaaccctggtgggtggaggttgcagtgagctgagattgtgccactgcactccaggctgtgcaacaagagtgaaactccatttcaaaaaaaaaaaaaaaaaaaagagaagaaattcaccaccctaaactcacaccttccttctcccataagtgcatgcccatggacgtgtacgatggctgctatgctgctgtttctcctctgggctgttgtagtcttgtggtggcccacattctgctgcagttggaaacatccccagatctctgtggtttagaaaagctggccaggcatgatggctgatacctgtaatcccagcactttgggaggccgaggcaggcagatcacctgaggtcaggagttcgagaccagcctggccaacgtagtgaaaccctgtttctactaaaaatataaaaattagctgcgtgtggtggcacacgcctgtaatcctagctgcttgggaggctgaggcaggagaatcgcttgaacccgggaggtcaaggttgcagtgagccaagattgcaccattgcactccagctttggcaacaagagtgaaactccatctcaaaaagaaaaagaagaactaaggctgtcatacttggagtctcacatctgtaatcccagcacttttgggggctgaggcacgaggatcgcttgaggccaggaggtcgaggctgcagtttgctatgattgcgccactgcactccagcctgtgtgacagagtgagaccctgtctctaaataaataaataagtaaggcagggcacggtgtctcacgcctgtaatcccagcactttgggaggccgaggcggacggatcacctgaggtcgggagttcaagaccagcctgaccaacatggagaaacccccgtctctactaaaaatgcaaaattagcggggcgtggtggcgcatgcctgtaatcccagctattcaggaggctgaggcaggagaatcgcttgaacccaggaggcagaggttgtggtgagccaagatcgcaccattgcactccagccttggcaacaagagcgaaactctgtctgcaaaaaaaaaaaaaaaaaaacagcctgggtgcagagcaaaaccctatctctaagtaaatgaataaataaatagcaaagctaaggcttatttcttagcggcaatagactttgttagttgtagtggtacagaaactggcctaatgggagggtcattttctcacagtgaggacggtgttgtctaaagaaacatccaagcttttaaataattaaagttggccagccatggtggctcacgcctgtaatgccagcactatcggaggctgaggcgagaggatcacttgagcccccgggagtttgagaccagcctgggcaacacagcaaggccctgtctgtacaaattaaaaattagccgggcatagtgatacctgcctgtgtagtccctgctactcgagaggctgaggtgggaggatcgcctgagtctgggaggtgaaggctgcagtgagctatgattgcataactgcactcctggctgggtgacagagcaagaccctgtctcaaaaaaaaagaaaaaaaaaatttgggactgggtgcagcggtggctcacacctgtaatcccagcactttgggaggccaagctgggaggatctgttgagctcaggagtttaagggcagcctgggcagcagtgaaacaccatctctacgaaaaaaacacacatgatcgggcatggtggctcacgcccgtaatcccagcactttgagaggccaaggtgggcggatcacgaggtcaggagttcaagaccagcctggccaacatggtgaaatcccatctctactaaatatacaaaaaaaaaaaaaaaaaaaaattagccgggcatggtcgtgggtgcccgtagtcccagctactcgggaggctgaggcaggagaattgcttgaacctgggaggcagaggttgcagtaagctgagatcacatcactgcactccagcctgggcaacagagtgagactccctcttaaaaaaaaaaaaagaaaaaagaaaaatccacacacatatataattcagatgattgttaaaagtaaacaaggctttattcaagactactgcatggaagattgagctcaactcggaatccacgaagttgtcaccaaggggggatttatagccacggagcagggcaagggggggtcagtggatagaaaattataaaggcttggggagtcaccttaaactctcttaataggatccttgctgaagccaggccagggcgatcagctatcaagaaactgacttagcaggattcttgctaaaactgggcgacacagatcaaagacaggatgggagccaaggtcacggcccaatgcagaagagatttcagaggactctgactcaagtttggccaagaagagagtctttgtcggggcggagacctggcctggccctgggaatctgagacgggggacagtgcgttctcctggaaggggaggtgagcggggatgatgcaaaacgtacgccctttccccaaactcttcagctgccttggaaaaactaggtctctgatgctaaggcacctgcctgcatctcctggctcccggcacacggatcatctgccaggtctcgcccaggctcctctggcgccagccacagaacccgatccagccagaaagcaaatgccgtttgtcctctctgccgtccttctcagctgccccaaaagcagccccagatctcatttcagggagtctgtgtgtgaccaggggcctgaggatgatccatcctggccttgggtccaactagaccaattgtcactgatgacagggccactcaccctgcaaaatcccagtcctctgagcccaggcaggcctggggactgcatcacgcaagggttagaggggcccgatggagcctaccccacctgcttctgacttgggtatcatcaatcctaacatttctgggctgagcttacatcatcttgggctactgaggaaggagctgagggccctgggaaccacagcactaagtccaggatccgtgcctatccttctcttcttttattattattattattttttgagaccgggtctcactctgtgacccaggctggagtgcagtggtgcgatctcggcagctcactgcaacctccacctcccgggttcaagtgattctcctgcctcagcctcctgagtagctgggattacaagcatgaaccactacacccagctaatttttgtagtttttggtttttttttttttttttttttttttgagacggagtctcactctgtcgccaggctggagtgcagtggagcgatgtcggcccactgcaacctccatctcccaggttcaagcaattctcgtgactcagcctcccaagtagctgggactacaagtgcccaccaccacgcccagctaaattttttgtttgtttgtttttgagatggagtttcattcttgttgcccaggctggagtgtgatggtgcagtctcagctcactgcaacctctgcctcctgggttcaagcgattctcctgcctcagcctccctagtagctgggattacaggcgcccaccaccacgctcggctaatttttgtatttttggtagagatggggtttcaccatgttggtcaggctggtctcgaactcctgacctcaagtgatccgcccacctcggcctcccaaagtgttgggattacaggtgtgagccaccgtgcccggtccttatttctgtatttttagtagagatggggtttcaccacgttggccaggctgatcttgaactcctggcctcaagtgatccacccgcctcggtctcccaaagttctgggattacaggcatgagccaacatgctggcctaatttttgtatttttagtagatatgaggttttactgtgttggtcaggctggtctggaacagctgacctcaagcgatctgctcacattgacctcccaaagtgctgggattacaggtgtgagccaccatgcctggccatttctcttttcttgagacaaggtctcactctgttacccaagctggagtgcggtggtgcaatcatggctcaccgcagccttgacctcctgggcacaatctatcctcccatctcagtctccctagtagctggaactataggtgtgtgccaccacacttggctacatttttacttttgtagagatggggtcttgctatgttgcccaggtgggtttctctcctattgcttactcccaggctccacaggggcatgggtactgagagtggcatttctggatagacgtgatcccagctcctctactcaatagctgctgaccttgagctgcggcttaaacttctctgcgcctcagtttctccatctttacaatgggaacctcaacattcctcatctcatgggatacgtgtaagggagaatgcataggacccgtgtctctcagctgcccctgatgactcttgaagaaacacctcttgactctgacaggcctttgaaggtggaaggtttctgcagcctgacatccaggcagaatggatgatgtgactccccgtgagtggcctctgctagtggcaaaccctatacttcctgtattcaaaagtggcagaggggctgggctctgtggctcagccctgtaatcccatcactttgggaagctgaggtgggaggatcacttgagtccaggagtttgaggccagcctgggcaacatagggagaccccagtctctatagtatttttttttttttccaagacagagtctccctctgtcacccagtctggagtgcagtggtgtgattgtggttccctgcaacttccatctctggggttcaagtgattctcctgcctcagcctcctgagtagctgggactacaggcgcccaccaccacccccggctaatttcttttttttttgacatggagtctcgctctgtcgcccaggctggagtgcagtggcgcaatcttggctcactgcaagctccgccttttgggttcatgccattctcctgcctcagcctctcaagtagctgggactacaggcgtccgccaccatggccagctaatttgtgtgtgtgtgtgtatttagtagagatgaggtttcaccgcattagccaggatggtctcaatctcctgacctcgtgatctgcccgcctcagcctcccacaagtgctgggattacaggcgtgagccacggcgcccagcctaatttcttcctttcttcctttctttcttcctttcctttctttcctttcctttctttcatctcttttttccttttctttcctttcttttccttcctccctccctccctccctctctctctctctttctttctttctttgtatttttagtagagacggtgtttcaccttgttggccaggctggtcttgaactcccgacttcaagtgatctgcccggttcagcctcccaaagtgttgggattacaggtgtgagccacagcgcctggccatgaccagctaatttttgtatttttagtagagatggggttttgccatgttggccaggctggtcttgaactcctagcctcaagcaatccgactgccttggcctcccaaagtgctaggattataggagtgagccactgtgccctgcctacttttcttttaaacagatagggtcttgctctgttgcccaggctggatcgtagtggttcaatcactgctgatcttcttgcctcagcctctcaagtagctgggaccacaggtgtgcaccaccatgcctggctaatttttaatttttttgtagagctggagtctccctatgttgcccaggctggtcttgaactcctggcctcaggtgatcctcttgcaagagaacatctttgacagatactgtccacaccctagaacataccagaatgctgacagagcttgtgtttgcgaggcctgtggaattaatggagacatttctacccttttcgactggggccttgtgcctatggcttgttgggtaggggagatcacctccgtttgtaaagaacgaaactgagtttgcattactgttccttaaggcaggtctgcccagctcccggaacactctgaaagccgcacgccaaacccatatcaggtgcctggagtctggaggttttggctgcagccccaggaccagccttgccctgcgcctcacctgattctggctgagataggaagatgctcggtaactcagctccccttccaggcagtgcagacgagggggcggttttcagccgggcctcccaagttggaaccttatcatttccaaggttcaagtttgaggtatcaggaggaagagcagggaccagcctagggtgaggttgctgaggtgcccagggtgcaattttttatttatttttatttatttattttttgagacggagtctcgctttgtgcccaggctggagaggagtggtgcggtcttggctcactgcaacctccgcctccctggcttaagtgattctcctgcctcagcgtcccgagtagctgggattacaggcacccaccaccatgtccagctaattttctgtatttttttttttttttttgtgggggacggagtcttgctctgtagcccagactggagggcagtggcacaatctcagctcactgcagcctccacctcctgggtcccggttcaagcgattctcccgcttcagcctcccaagtagctgggattactggcatgcgtcaccatgcccatctaatttttgtatttttagtagagacagggtttcaccaagttggccaggctggtcttgaactcctgacctcgtgatctgcccaccgtggcctcccaaagtgctgggattacaggcatgagccactgcgccggccttgctttatttttgtgtgtgtgggagggagcatggtggcacacccctgtaatcccagctactgggtggctgtggtagaattgtttgagcctgggagttcgagaccagcctgggcaatatagcaaaacaccatctctacaaaaataaaaaatacaaagattaaccaggtgtggtggtgcatgcctgcagtcccagctactctggatgctgagtcaggaggatcacttgagcccaggagtttgaggctgcaatgagctatgatcacaacactgcattccagcctgggtgatagagcaaacccctctctttaaaaaaaaaaaaaaaattaaaaatgtgttgaggtgaaaaatcacattaacataaaattaaccatttagaagtatacaattcaggccaggcgtggtggctcacgcctgtagcactttgaggggccaaggtggatggatcatttgaggtcaggagttcgagaccagctggccaacatggtaaatcaccatctctactaaaaatgtaaaaactatccaggcatgatggcccttgcctgtagtcccagctacttgggaggctgaggcaggagaatcacttaaaacagggaggcggaggttgcagtgagccaagatcgcgccactgcactccagcctaggcgacagagtgagactctgtctcaaaagcaaacaaacaaaaaatgtaaaaactagccgggcatggtggccctttcctgtagtcccagttacttgggaggctgaggcaggaaaatcgcttgaacccgggagacggaggtggcaatgagccaagattgggccattgcactgcagcctgggccacaagagcaaaactccatctcaaaaaaattttaaaaaggccaggagcagtggctcacacctgtaattccagcactttgggaggccgaggcaggggatcacttgaggtcaggagttcgagaccagcctggccaacatggtgaacccgtctctactaaacatataaaaattagccaggcatggtggtgggtgcctgtaatcccagctactcaggaggctgaggccggagaatcgcttgaacttgggagacggaggttgcagtgagccgagattgtgccactgcactccagcctgggagacagagcaagactctgtctcaaaccaaaaccaaaaccaaacaaaactaactggtggagcatgcgtcccagcctggggactacaaggggcatggcctggctctcacttttgcccttccttcccccgacccaagtcccacccatgggcctgggcttggccacgcagcacaattgaacattgagtaacacacagatagtgaatatcagagtttacttgtgggttgtgcaagacaggagacctttggagacccctctgttatttccttgagccccagaaactacccatgcctacaccccaaaagcagcagcagcatgagaacgattaacacacattgaggacctattgtgtgggggtccccggaatgcctcacatgaagtcatgtgtcttgtcagagcccttggagacagggccacttcgtgtccccatattacagatgaggaaactgaggcacaaagcagctaagccctcagccatgggtccacagccaggaacctgggtccagctctccagccgtgcccctggccctgggctgctccaagcttggcacacatggatttgaaatgttcacagcccgagggggtgcagtggattttgcagagtctgagacttgcacatcagcagcatggagattatggggttcaggtgagaatcctggctctggtgctcagtcctggccgtgggccccctggtgagtcactgcctctcttggggcctccgtttcctcatctgtgaaatggatggagacacttagagaatcactgcctaagccccccgctccccttatgcctgtaacagaatctcatccatctggacagccacatttcccagcctcccctgcagcaaggtatggccatttcgctctgttctggccagtgggatataaaaagaagggtttcgaggcttcctgggaagacttccaggagacacctagccagcgctggcctctgactttccctcagaatgaggaggtgaaggctggagctctggcaattattttgtgccacgaggcaaccttgaggacaaaagccaaggatgcaataaaatgagagaaaaatcaagtcctactgctactgcagctgaacccgaacctatctctatggtatccttttcttacaccaggtctctattcctcatccctgggctcacaccagtgtggagtccttccccatgctccctggtctgtggcccagcattcgacgcatctcgtgcgtaaccccgtcccagtgccccaggccagccgacagtgtccggtgcattctggatgcaggcaggctgctctcccagcctccctccagggctgcaggtgctgtggcagtggccatggacccaaaggggtccccaggctctggacaggttgaatagggggtccgacgatggataccctgctgaggctgagctctggggctggccttggagacttcggcagggcgggcgaggtcgtcttcaaaggatggcggggacaactcatggagcccacggcgggcagcccgggcagcccggaggagagtgtgggtcagcacagccaccagaaccagggtgcccgagccgaggatggaagcagctgctgcgcctgtctcgatctcgaaaagtagcaaggcatagatggacagtgctagggaaggaaacgactctcatttattcagtcaacaaacatttgccctccaagccctcagggagttcttgcacacagggagaaattacgaaaagccctgccacatgacaggcacatagaataggcatttaatcctcccacatcccactcgtgcatcatcatcacatccattttacagagaagaaagctggggcccagagaggttaggggactcctcaaagccacacagccaggaagtgacagaggtgggattttaacccaggctggtgggctccagagtctgtgctctgaagcacagtgctgcctccgaaggagacaacagaaagagactaatttcagcagctgtgggccagggcttccctgaggaggagctatttgagctgagaccctggggaagaagcagcagtttttgggagagctgaggaggatgacagctgcagggacatggcaagtgcagaggtcctgaggtggaaacacccaagagtgtccgaggctcagaaaaaagcaaaacgggttctggccgggctcagtggctcacgcctataatcctaacactttgggaggctgaggcaggtggatcacttgaggtcaggagtttgaaaccagcctgtgcaacatggtaaaaccctgtctctacaaaaaatacaaaaattagctgggcatcgtggcgggcgcctgtaatcccagctcctcaggaggctgaagcaggagaattgcttgagcctgggagatggaggctgcagtgagccgagatcgcaccactgcactccagcctgggtgacagagtgagactcagtctgaacaaaaagaaaagaaaaaagaaaaatgggttgtgtagctggagcagaaaggtggagaggtgggggagagatggaggagttaaggaaggagtggatgttggggaccagatgagggtgggggccacagaaaggggtgtgggtcttctccttcttctccttcttcttctttttcttcttgttcttgttcttgttcttctttttttttttttgagacagggtcttgctctgtcacccaggttggaaggcagtggctcggctacagctcactgctgcctcaacctccccaggctcaggtgattctcccacctcagcctcctgagtaggtgggactacaggtgcatgccaccatgcctggctaattttttttttttttttttttgagacagaatcttgctctgtcacccaggctggagcacagtggtgtgacctctgttcactgcaacctctgcttcccgggttcaagcgattctcatgcctcagcctcccaagtagctgggattataggcacccaccaccacgccagctaatttttgtatttttagtagagacagggtttcactatgttggccaggctggtcttgaactcctgacctcaggtgatccgcccaccttggccttccaaactgctgggattacaggcatgagccactgggcccagcctgatttttgtatttttagtagaaacggggtttcgccttgttgcccaggctggtctccaattcctgagcgcaagtggtcctctagccttggcctgccaagagggctgggattacaggcgtgagccactgtgtcctaccgggttttcttctaagagcaatgagtagggggattttggagctggggaggaacaggacctacctgctctatctttttttttttttttttttgagactgagttttgctcttgttgccgaggctggagtgcagtggcacaatctcagctcactgcaacctctgcctctcgggttcaagcaattctcctgcctcagcctcttgagtagctgggattataggcatgcaccaccatgcctggctaattttgtatttttagtagagacaggggtttcaccatgttggtcaggctggtctcgaactcctgacctcaggtgatccacctgcctcggcctcccaaagtgctgggattacaggcattagccactgcgcccgacacctgctctatctcttaagaagcctcccttgccgggcacggtggctcacacctgtaatcccagcactttgggaggccgacgtgggcggatcacaaggtcaggagatcgagaccatcctggctaacacggtgaaacctcatctctgctaaaaatacaaaaaattagccgatcgtggtggcgggcgcctgcagtcccagctattcaggaggctgaggcaggagaatggcgtgaacctgggaggcggagcttgcagcgagccgagatcacgccactgcactccagcctgggtgacagagcgagactccatctcaaaaaaaaaaaaaaagcctccctgttggtggaatacccatatgagggaatatgatgcagcatgtaaggaatgaggcaccgctccattctacaatgtggatgaaccaggaaaacatcgttctgagtgagagaagccagatgcaaatagccacagagtgtgaggtgtcattgatctgaaatgtccagaacaggcaaatcctggccgggcgcagtggctcatgcttgtaatcccagcactttgggaggccgaggtgggtggatcacctgaagtcaggtgttggagaccagcctggccaacatggtgaaaccctgtctctaccaaaaatataaaaagtagccaggtgtggtggcacgtgcctgtaatcccagctacttgggaggctgaggcaggagaatcgcttgaatctgggaggtggagattgcagtgagccgagatcgcgccgctaccctctaccctgggcaacagagcaagacgctgtctcgagaaaaaagaaaaaaaaaaaaatacaagcaaatccatagagacagacagtagattagtggcttccagggatgaggaaggggcaatggggagtgattgctaatggagacagggtttcctgttgggtgatgaaaatattctggaaccagatagtagcgatcgttgcctaagaccgtgaatgtgctcaatcccactgaactgttcactttaaagtgggtaacggctgggcgaggtggctcacacctgtaatcccagcacttttggaagccgaggtgagaggttgcttgaggccaggagttcgacgccagctcaggtgacatagggagaccagtccctacaaaaaataagaaactatcgaggaatggcagtgcttgcctacggtcccagctagctgcggggctgaggcagaagaattgcttgagcctaggacatggaggctgcagtgagctatgatcacaccactgcactccagcctgggtgacacagcgagaccctgtctcaaaaaatggaaataaaatacactggttaaaatggtattttttttttttttttttttttgagatggaatctcgctctgtcacccaggctggagtgcagtggcgcaatctcggctcactgcaagctctgcctcccgggttcacgccattctcctgcctcagcctcccgagtagctgggactacagccgcccgccaccacacccggctaatttttgtatttttagtagagatggggtttcaccttgttagccaggatggtctcgatctcctgacctcgtgatctgcccgcctcggtctcccaaagtgctgggattacaggcgtgagccaccgcgtccggcctaaaatggtaatgtttttgttatgtgtactttgccacagtgaaactgcaacttaactgggtatggtggtgtacacctgtagtcccagctacatggattgggagactgaggcaggaggattgcttgagccaggagttcaagtccagcctgggctacatagcaagaccctgtctctaaacaaacaaaaccagaaacacccccagcaactcagctctcagggtcctgcatctctgtctgtctctgcctggggtgggggtgagggtcaaggtggaggagccagcctctgctctctactctctggtgcccacaggtttgccacgccccaggcttggggggcattgagagattcacaacccctctctggcctcagttagccaatgtgaataagaagggaccttgagggaccgggcgtggtggctcacgccagtaaccccagcactttgggaggccgaagtgggcggatcacttgaggccaggagtttgagaccagcctggccaacatgatgaaaccccgtctctgctaaaaatacaaaaattagctgggcgtgctggtgggctcctgtaatcccaggtacttgggaggctgagggaggagaatcgcttgaatctgggaggtggtggttgcagtgagctgggatcactctactgcacttcagcctgggcaacagagcaagactccatctcagagaaaaaaaaaaaaaaaaaagaagggactttgaggacctgagctagctagccctccatcagcctctccagcatacagttggcaccattcttagtggtggtgcatcgtaggacgtttagcagcttttacccactagatgtcagtagcatcccaccctcaactctgtggcgaccaccaaaaatgtctccaggcagtgacaaaagttcctctgaggccagaatcagtctcagtggagaatccctggtttggtccctatctctacactgcagagtggatttgggatcactaagccactttggcatcaatgatgtcctcattggaccaagctcagccaatcagagcattaattgcttcccctgatgttagtgattggtggaggaatattacatggcccaagctcagcctatcagagtcagccctgagactttagcctgggctactgggacagatagattttcctgcagcgtctagggtattggtaggagaggggcccagaacacatgggggacttttttttttggcactttccaggctgtttatacgcgttctctggctctgtactattgctttggaagatatcacactgcatgatgtcccacatgtgaaagcaaggccaaggactttttttttttttttggctggaaacattttgaaagggattttgtaattattcttttagttctagctagcgatgaatggatgattggttggatgtgcttgggaattcttgctgaatgaggtcacctagcctcaaaaacaatctaaatgggaggtgaatgaattctcaattttacgcttagtgaggctgacataatgttaccttttttttccttttgtaattgttcttgtattttagaatgaggatatcttattccctaggtctttaatatttctgttggcctgtgcaaagactcaaggctccaggcatcgtgtcaaaagtgcttacagatagaggcatctttctcagagagaagcccattcagggaacagcagatgaacaggtgaagtgacaagcatttctgtttcttttttcttttattattattattattatcaacaacatcatttttgagacagagtctcactctgtcacccaggctgtgcaatggcacaatctcggctcactgcaacctccgccccctgggttcaagcgatcctcctgccttcagcctcctgagtagctgggtctacaggcatgaaccaccatgcctggctaatttctttcttttctttcttttttttttttttttagatggcatctcactctgtcgcccaggctggagtgcagtggcatgatcttggctcagtgcaacctctgcctcccaggttcaaacaattctcctgcctcagcctctggagtagctgggattacaggggtatgccacaatgtttggctaatttttgtatacttagtagagatggagtttcaccatgttgcccaggctggtctcaaactccacctcaagtgatccactcgcctcggcctcccaaagtgctgggattacaggtgtgagcaaccacacccggctgagaggcatttctgataacctaatttgagtgcctggatccagccacacctgaagccaacttcccctgacaatttcagatgcacaagtcatccatcccttctcctttttttaaaaaaaaaactacttctggagcatttcattaagtcaaacaacaaaagttatgcagtgttccgtgcacttcacatatataaattcccacagtgagccttaggctcacatctcattaaaaatattttgagggcctggcgtggtggctcagggccgggcgtggtggctcacgcctgtaatcccagcactttgggaggccgaggttggtggatcacctgaggtcaggagatcgtagaccatcctggctaacacggtgaaaccccgtctctactaaaaatacaaaaaattagctgggcgtggtggtgggcacctgtagtcccagctactcaggaggctgaggaagaagagtggcatgaacccaggaggcggagcttgcagtgagccgagatcacaccactgcactccagcctgggcgacagagcgagactccgcatcaaaaaaaatttttttaatatatctttttaaacatttatttatttatttatttatttatttattgagatgaagtttcagtctgtcacccaggctggagtgcagttgcacgatcttggctctctgaaacctccacctctcaggttcaagtgattctcccacctcagtctcccgagtagctgggattacaggcagctgccaccaggcccagctaatttttttgaatttttaatggtggggtgggggggcggtttcagcatattggccaggctggtcttgaactcctaccctcaagtgattcacccactttggcctcccaaagtgctgggattataggcatgagccaccgcgcccggcctaaatatctttttaaatttctattttctgtggtgggactatgaaaaaaaaacagtaatagcaaatcctgtttttcattcagtaggatattttttcttcctgtaaaacagattgtttacagggctggcagggacttatatatgattcagcattgagtccgcagcatcatcaacacatttgtttcaagattaaaaccaaatataaggcgttaggagtctcttgaaagacacttaatgatttcattcctttaccagcccggatggatgaaagaaagttgattgaagaaaagttattacaaatcaggaaggaaggacagtgtgatgcgttccagcatctggggtatccttttttttttttttctcaagccatttttgagctggagattgatatttgtaaccaaaacagctttcactcattccaacctgtaaaatgctatctttttttttttttttttttttttttttgagacggggttttgcccttgttgcccaggctggagtgcagtggcacgatcttggctcactgcaacctctgccccctggttcaagtgattcccctgcctcagcctcctgagtggctgatattataggcgcccaccaccatgcccggctaatttttttgtatttttagtagagatggggtttcaccatgttggccaggctggtatcaaactcctgacctcaggtgatccaccagcctcggcccctcaaagtgctgggattacaggcgtgagccactgcgcctggccaaaatgctatctttagacaccacgcaggccatgaaaatttttgttcaaacaaattataaaactgatgaatcagaagtgttctgatgacagctagcatttgtggagtccctgctggagtcagatgccatccacgggcttttttttttttttttttttaatgagatagggtctcgctgtatcacccaggctggagtgcagtgcagtggggtgatcatggctcactgcagcctcaaccttcgggctcaagtgatcctcccaccttagcctcccgaggagctgggactacaggtgtgtaccaccacaccaagtctatatatagatatataatatataaatataaatatattatataaatatatattaatataaacatataaatataaatatatatttatatatttaataaatatatattatatatatatatagttttttttttttttgtagagatggggttttgttatgttgcccaggctggtctcaaactcctggcctcaagcaatcctcctacctcagtctcccatattgctgggattacagatgtgagctactatgcctggtcctatgggctttcatgaggattaaatctcagaatctcctcaagtgattctgtgaggtaatgacagttattcccattgtactgatgaggaaatcaaggcacagagagactttgcccaaggcaccaaagcaaagaagtgtcagagcctggagttgaactcaaggaggctgtctgcagagttgatcccagttaggggaccattgctgctctctacccagcccagggtcccatgccccacgttctattccagcacacacctgctaaatagacggagatcccacagcagaaaaggccaagggccacatgtctgaggaggcggcagtcgtagagaaaccagtcagacctggaatgaaggggagcaggaagataaagggttcaggaagtggagctggtggggggaggtcagtgaggacagggagggagagccgcttaaatgagacaaggacccagctttcagggacccaaaatctatgtgagtacctaaccatcatccatctacttgcccacccatttacatccatttacttatccactctccatctatccatcaattcatccatcagctcatgtatccatcagcccatccatccatctatccacccatttatccattcatccattcatccatttatccacccattcacccatttgtccactcatccatccatccacccatccatccatatgcccattcatccatccacccacttacccatccatccatccatccatttatccattcatccattcatccacccattcatccatctgtccacttatccatccacccatccatccatccatacttccactcatccatccatccacttatccatccatccattcacttatccatccatcaaaccagtcatccatccactcattcattcatccatccacttatcaattcattcatccatccacttatccatccatcggccccacccattcatccatccatacaatcatttagatatccaccatccactatctgatatctatccatttatctatgctccatccatccacacatccatttttccaagtcagtgtccaccatccatttaccattcatattcattgattatttgaccagcactcatatacagccttccatccatttaaccatgtgctattcatccatccatccattcatttaaacaccctctgctatcctatctatccatccctcacccacccatccactggtcatccatcttccattcactatccatccacccctcatccatccatccatccatctatccatccatccattcatccttccttacttcgatccatccaccatccattctctttcccctataacccatctatatgcatgagtccactcaaacactcaacactcaggatgcagctactatgtgcagatacttgctacacacctggcttccattattttacagactacaagcttctttgagagatgaggaaactgagtttcacatgctgttattgatgatacaaaccgcgaccccaagaggtgagactgattgaggaggaagtggaggctataagagcttccatcctcactcagctcccaccagtataatgaaagtggacgccttccccatcttcctgtcgccttccctcctgtccccttttcagcacagtggctagaggtggtcattcaaaacctaaatcagatcaccttcctccttactcacaaccctccttagcagaagaaatcccaaagtcctatctcctctctatcccatctctctgtttcctttccttctcagcactcattaccatctgctattattattattattagagatgaggtctcactatgttgcccaaactagagtgcagtggttattcataagcatgatcatggctcactgcagccttgacctcctgggctcaagggatcctcttgcctcagcctcttaagtgtatgggactacaggcatgcaccaccacacctagctaattattattttttctttttgtagaggcaaggtcttgctatattacccaggctggtctcaaattcctggcctcccagcactttgggaggccaaggtgggtgggtcatttgaggtcaggagttcaagaccagcctggccaacatggtgaaaccccgcctctactaaaaatacaaaaattagctgggtatggtggtgggcacctgtaatcccagctactcgggaggctaaggtgggagaatcgcttgaacccaagaggtggaggctgcagtgaaccgagatagcgccactgcactccagcctgggtgacagagcaagactctgtctcaaaaaaaaaaaaagaaaaaaaaattcctggcctcaaatgatcctcctgcctctgcctcccaaagggctgggattgcaggtgtgaaccaccatgccttgtccttgttatgtttccttattttctgtgaccccatgagagcaggtctgggtccacttggtccccgctgtctctgatgccctgagccagatccattcccctgcaggcaggcacccaacagatgtttgctgacccgtgggacccatgcatttcattgtcccttgggtggaaggtgcatggtctggataggatctacctcaatggtgggagttctcatctgctcaatttcacagaattctggactagaatttgggctcctctcccccgacattctggagagaaacactaccatgtgggacagcggagtcctcagctcaaggagggttcctccttccacaaccactgcccctgataggggtccctcaatgaccacatccctgactgagttcaggtccctgaggaaggaactcaatttcagaccaggacacaggctctggctggctctacccagaaccaagttcaagtccagcactgtcccgcctcccacccacttccaagccagacagcctgagagctcagcctcccctgtttgagatccaggcaagctgatcctggaccctctttgagcctcagtttcctcatctgcaaaatgcgagacacagcagtggttgcacctgctgcaaaattgaacaaatatagaatggagggagggaaggagggaggaggagaggaaaggagggaggcagagagacatggagtggtggggagagggaagtggggagggaagctgtccccccagcctgaggccaaaagaggggaagaggctcaaccaggctcacccagcccccagccgggcctccgaggcggtgaggccagtcctcctacctcctggggccaggcccccgcgccagctcggcgcccaggtggccacagagcgcggcgagcagcaagcaggtgaaccccagcacgagcaccagcgcggccagcgcggcggccagcggcagcagcgtcccggccgcgtcctctggcagcccggggccggcgcccagctcctggcccagcccctcggcgcgcagcccccgcagctcggcgcggcccgcctgcagctgaaacagcagctgcgcgcccagcgccgccagcacggccgccgcgatgcccagcagggtcattgcagccagcacccggccgccgtaagaacgggccatggcgggggttcctgcgggccgggggaagagttgaggaattgaagtggttttagagggcaggggagttggggggaatccgagggtcctcagggggtccccgagggggcggggccgcagggagtgtctgaaagttcggggactgggctgggggtcgccagacggacgggggctccggggtgctggtcgcagccgggacgccgaatctccgcgaaaacttgggacaaagtcttttctcctccctcccggggccccgcgggcgccccctcttggtccgctgggcctggcggggcggggcctggcaccgggcgcagggcggggaggccccactagggactggatcgcgggaaccccacagctcgctaagttcagaaaagggcaccaccccgccccctgccgccctaagcatcgattgtattgtggtttaaaacaagaaaaaggaggccgggggcggtggctctcgcctgtaatcccagcaccttgggaggccgaggcgggcggatcacaaggtcaagagttccagaccagcctggccaatatggtgaaaccccgtctctactaaaaatacaaaaattagccgggcgtggtggccggagcctgtaatcccagctactcgggaggctgatgcaggagaattgcttgaacccaggaggcggaggtttcagtgagctgagattacgccattgcactgcagcctgggcgacagagcgagactccgtctcaaaattaattaattaattaattaaaaaataaaaaataaagagaaaggaggccgggcgcggtggctctcgcttgtaatctcagcactttaggagtccgaggtgggcggatcacttgaggtcaggagttcaagaccagcctggccaacatggtgaaacccccgtctctactaaaaaaaaaaaaaaaaaaaaaaattagcccggcgtagtggtgcatggcctgtaatcctagctactcgggaggctgaggttggaggaatgcttgaatcagggaggcggaggttgcagtgagccgagattgcaccactgcacactccagcctggctgacagagtaagactccatcaaaaaaaaaaaaaaaaaaaaagagagagagagagaaagggctgggtgaggtggttcacaactgtaatcccagcactttgggaggctgaggcaggaggatggcttaagcccaggagtttgagaccagcctgggcaacatagccagaccccatctctacaaaaaataaggaagtcagcctggtgtggtggtgcacgcctgtggacccagctactttcgggactgagacaggaggatcgcttgagcccaggaggtcgaggctgcagtgaactgagatcacgccactgcactccagcctgagtgacagagcgaggctgtgtctcaaaaaagaaataacaaaatttaaaaattcacttttcatttgatctcaacccagggactctgtcattggctgtgatttcccctctgcttacttccttcaagcctttgggtaaccgttgcttcctctaggaggctagggagaatcctggatcccttccccaactggtcccccaaattattcgcacagcactttaaaaaaatcgagatgaaacttacataacataaaattaatcattttattcagtggcatttagtgttgtacaatcattacctctgtctagctccagaagattttcatccccccaaaaggagaccccatccccattaccagccactccccattccccctcctcaagtggctcacaaccattaatctacttcttgtctctgtcgatttgcctgttctggacacttcatatcaatggagtcatacaagaggtggcattctggcttctctcactctgcatgatgtactcaaggttcatcgaggttgtagcatggatcagtgcctcattcctttttatggctgcgtaatattccatagcgtgtctggaacacattgtgttcatccgttcatccattgatgggtatttgtgttgttggttccttttggtgaaggtgactaatgctgctataaacatgtgtgcacaggtatcttcttgagtcactgctgtcaattcttgtggggcgtggactcctaggagtggagttgctgagtcacatagttactctattttaactctttgtggaaccctcaaacttttccacagcagctgcaccgttttccatttccaccagcaatgtctgaggtttttaaaaataattttctgcacatcctccccaacacgtgtttcctcctgccctcctcctcctcctcttccttctcctcctcctcctcccttccttctcctcctcctcctttcttcctcctcctcgtctcctcctcctccttcttctttttttttttatcagggccttgctctgtcacccaggctggattgcagtggtgtgatcatagctcattacagccttgacctcctgctcaagtgatctttctgcctcagcctctccccaagtagctgggaccacaggcaagcatcagcatgcctggctaatttttaagtttttttttttttttcatagagatggggtcttgttatgttggtctggtctcaaactctttatacccaagtgattctctcacctcagtccccctaaatgctgggattacaggagtgagccaccacacccagcctcctccttcctcataatagcctttttttttttttttttttttgagatgaactctcactctgttgcccagactggagtgcagtggtgagatctcggctcactgcaacctccacctcccgggttcaagcgattcttgcacctcagcttcccaagtagcaggattacaggtgcctaccaccacactcagctaatttttgtatttttagtagaaacagggtttcaccatgttggccaggctggtctcaaactcctgcctcaagtgatcctcccacctcggcctcccagagtgttggaattacaggtgtgagccaccatacccagccagtttttaaaatttttttgtagagatggggtcttgctatgttggtcttgtctcaaacttcttatgcccaagtgatcctctcacctcagcctcctgaagtgctgggggattacagagtgagccaccacacccagcctcctcctccctgataatagtcattctgatgcttataaagtaatatctcattgtggtttttatttgcatttccctaataactaatgatgttaagcatcttttcatgggctttttggctgttcatatatcttctttggagaaatgtctattcaaatcctttctctattttaaattaattaattaatttttttgtagcgatggggtcttactatgttgtccaggctcatctggaactcttaagctcaactgatccacccactgggcctcccaaagtgctgggattacaggcatgagccactgcgcctggactggaatcaagtttttttttcaggtttgaaaattttggggccccttgaaaagagtttgtgggccctgtgccctcagcctcgtaggtaaaatggccccaaggaagagtatggggtgagggtgacccttcacttccaggtggcctccttctttgctgtgtgactttgggcacatcccttaacctctctgggcctcttcatatgtagcaagaacctgttccttctttcaattgattgatcgattgattgattcattcactcattcatcaggcctcagcccaacactcattctttcatcatcatcagtgttagggtgaattttccatgttttccaggtaaggaaaagtctcacgttgagggctcagcaattcatttggatcagggctacagtttgctctgggtggtgggaatacagagatacaagatattttcatgtattcattcgacgaacatcagtggagagcccatctacgtgctgggctctgaggacccaggggtgaccaagacaggcccagctctcccttctggtgctcacagcctggtgggggaggtggaaacatacatgaaaccccacaataaggggacacttacctaaatggccaacattcattgcagtgctggcttaggttttgccattatttgttggggttgggggaacacagataccaaggtctggtcctgctgtttgtatgtggggtgattctctagtttgggggtgtctggcttcaacttggaaagttaaccctgcaagcaggccccacactgctcttggtagatggtgagctcatctaccttggccttttgctaagctgcccttctcattccagctcagacaggtggggagtggggaggtggggatggggggtgaggcttggagagttccaccatacagtccaaggcacacagcctgacagggacagagagtggactccctcaacctcactgcccagatacggatggctggtcactgcatgttggctggaataatagtaacaatgttgacaggttacatcgcctgtgatttgttggaaaagggcaacctggtatgatttacagataatttaagtgatttttatttttttgagacagagtctccctgtgtcgcccaggctggagtgcaggggtgcaatcttggcagactgcaacctccgcctcccaggttcaagtgattctcatgcctcagcctcctgagtagctgggactacaggtgcgtgccaccacgccagctaatttatatatatatatatatatatatatattttttttttttttttagtagagacggggttttgtgacagtggccaggctggtcttgaactcctgacctcaggtgatccacttgcctcggcctcccaaagtgttgggattacaggagtgagccaccacgcccagactcaatgcacccatttcacagatgcgccacagcagtccagagagggctgctggaacatgaagcatcaggcagcaccagggtcctgagctgggtcaattttccaacctggaggttggaagtcgaggtgagcatgaaatcaggtggtcatccagtattcaggaccctctggcctcccaggcccccagcctccttcttcctgtcagccagattcccgtgcaccgcagtcacgcttgctagtttccatggacacgcgtggactcctaggaaaccttttccggagactgggcacgagaggagtgatttgcatctcatttgaatgctaggccctgccccgaaagtgtgccatctcgtcctgccgcgagggggcgccagaggccaaccaagcagttcgtgagccgagtgagcacctgctcctccttcttcactgacctgcctgggagaacctggctttaattctaatttttcagaggaagggattagtgtttagagaagggagttgatctcacggtcacaaagccaggagatggttctagatcggagtttttgatttctgtattctgccgtgttccctggtaatgccccagtccacgagcaacagagggagacctgggagactcttggctcctgctggcagcccgggacccccagcccacgtggtatcaaatattgaaatgcatccgtgtaacatataaatctgttgttaaaggattgttgtgattttgcgcatgaaatatgtgggcaactcggccggacgcgatggctcacgcctgtaatcccagcactttgggaggccgaggcaggcagatcacctgagatcgggagttcgagaccagcctgaccaacatgaagaaactccgtctctactaaaaatacaaaaattagtcaggtgtggtggtatgcctgtaatcccagctacttgggaggctgaggcaggagaatcgcttcaacccgggaggcagaggttgcggtgagccgagatcgtgccattgcactccagcctgggcaacaagagccaaactccgtctcaaaaaaaaaaaaagggggggggcaactcatttaatgtaggatgggcttggcgttttcagcacgtttgttctattttagtttagattttctcatttttggagccattaattactccccctcagccaggtctcagaaatatttatagagatccttgaaaagctctccctactttatctcctggccagggaggctcagatgcgcacctggaagaccagaacagatccctgggtgtgaggggatgtctcagaagagagaatcccctgccactcgctccatcctagctcccacccttccctgcatggggatcagaacagactccccaggtcctgtcctgcttctccctgtggatcttattacactccctctgccctgacccctcctggggatgggctcaaaacagacatcacccctacccatccccacttcgcctccacccctcttcatcatgggagctcagaacagccccccagcccctcctgcccccagaggagtgctcagaacccagacagtcccctacctcgtgctcccacagtgagctccgtcccgccctactcctgcgcagatctctgacaatcccctcccctcccctctcctcggcttccaagaggctcattacagattcccctcccgcggcctgcccacctggggcagaggaggactcagaacagccttccgacttccatccagccctctctctccgcagtggggggcaggcttttcatagaccggtcacccctccaccagtcttccccaactatggagtcagaacagcccccctcggccccaccctccgccttggcaacccccccccaaccctccgccggggcacccccaccccacatccctcccccactccctcccagctctccacctccggagtggaggggttcatcaccaaaccccaactcctccaccctagggggtcataacatccgcccttggccctgccctccgccctggcacccccacccccccacccccatcccgctctcttacgggggcggggcggggaaggagggtttccttttgtgtttttggggacagggtctccctctgtcgctcaggttggagtgcagtgtgcaagtggtgcgatcacggttcgctgcagccttgacctcccggactcaatccattctcccacctcagccttcagggtagctaagccacaggtgcgcgccaccacaccgggctaacttttaattttcgtagagtcagggtctcactctcttgcccaggttgatctcgaacctctgggctcaagcgatcctcccgccttggcctccccaagtgctgggattacaggcgtgcgggggtggggtgggggtggaggttcatcaacaaaccccactcctctcctccaccctagcgggtcagaacagccccccggccccgccctcctccccaccccctcccccggggtcgcgcccgcctcgcgccgccttttccacgcggtacttgtggcggcgcaggcactcggtgaggctccgtggctcctggtcctccaggtcctctggcagctggaagttgcggtccagcacctcggccgcctcctgccagttggcgaagcaggcggtgcccaggcgctggatctcgtcggcgccgtcgcgagtgagcacgtccccgtccggcttgagcaccacgaccgccggcaggcgctccactgagaactggcgcccgaggtccctgcggagcgggcaggtcagtctggacggatccacatccctgatgctgaaccagagagccccacatccctcctcccagtacttaggcagcgccttctgtgtgcactgcctcttgccgggcactgggtaggtgcacacgaggaccgggacagggccagacactttggtccccgcgctttgtctccagcaccccaggcatgctccaacctcggggcatttgtgctggctgtgcccacgtctggagcgctctcctcagacatttgcaggctaagaccctgtagtatggagacctcacatcgcaagacacaaggtcttactacatttatttgtagtaagaccctgtctctacaaataaataaataaataaataaataaataaataaagcagggtgtggtggtgcgctcctgtagtcccaggtactcaggaggccgaggtacctgggacttccctcgagaagtatcccttgagcccaggatttcgaggctgcagtgagctatgattgcaccactacactccagcctgggtgacacagccagatcctgtctcgaaaatagaataaataacattccaaggcagtgtttttctccaaagtgcctttcagcacccaacatcatgtatggtttttaaaatttctcctgcttggccggcgtggtggctcatgcctgtaatctcagcactttgggaggctgagataggcggatcaccggaggccaggagttcgagaccagcctagccaacatggttaacagttcttaatttcagcctgctgcattcttccgtggcccttttccaggctgccacaaagagaacccatgatacttacaaaatcccatgagtagattgccaggtttagtaattaaaaatataagacactcacaggagatcgagaccatcctggctaacacggtgaaaccccgtctctactaaaaaatacaaaaaattagccgggtgtggtggcaggcgcctgtagtcccagctactcggagaggctgaggcaggagaatggcgtgaacccggaaggcagagcttgcagtgagcccagatcacgccactgcactccagcctgggcgaagatactccatctcaacaacaacaacaacaacaaacaacatatatatatgacactccctctcttaaaaaaaaaaaaaaaattggaggctgggtacagtggctcacccctgtaatcccagcactttgggaggccgaggtgggaggattgcttgagcccaacggtttgagaccagcttcagcaacataacgagaccccatctctctctattctatatataaatacactagttaaatttgaatttcagataaacaatgaataatcttttagtgtaagtatagccaaatgcatgggacatacttatactaaagaaagattattcattgtttatctcaatttttttttctttttcttttttttagagacagagcctccatctgtcacccaggctagagtgcagtggcgggaacacagatcgtggtaacttcaaactcctgggctccagtgatcctatagcgtcagcctcctaagtagctgggactacaggctcgtaccaccacacctaatttttttttttaagtttttgtaaagatatggtcttgctatgttgcccaggctggttttgaactcctggcctcaactgatccttccatctctgcctcccaaagcactgggattacaggcatgaaccactgcacccagcctgaaatttcatttaactggacatcccgtctacgggggatgtggaatgggaactgcccagataacatactagtctgggtgaatgttttgttgagaggaccctgtctcagagaaggtcagcatttgtctgcagctggcgtctctgccccagggaaggaagcgttgctagcgtcagggaggaatctcctcagctgccgagggcagtgggcaggattcagtgtccaaactctgatgatgtccaaattctgatgatgaccagaaacttccaacttgttgagtaacaaaaggcatgacattgggaaaatgtcatgaagtctgcaactcactttcaaataatttagcacaaactatacacgtatgcatatacgtgtatatagacacgtatttttattgtagacaaagtgtatatgtgtctatagacacgtatttgtattgtagacaaagtgaatatggcaaaatgttaacaattgcgatgggtttcattgtacacttctttcaactttttgctatgtttgaacattttttttctttctttctttttctttctttctttttttttttttttttgtgacatagtctcgctctgtcgcccaggctggagtgcagtggcacgatctcgggtcactgcaagctccacctcccgggttcacaccattctcttgcctcagcctctccgagtagctgggactacaggcgcccgccaccacgcccggctaatttattgtatttttagtagagacggggtttcaccctggtttcgatctcctgacctcgtgatccgcccgcctcggcctctcaaagtgctaggattacaagcgtgagccactgcacccagcctgaacgtttttttcataataaaaagtcaagctataatactgtttcattgggcagctccttttgtaaatttttttaaaggatctttttaatttttttttttttttttttttttgagacagagtcttgctctgtcgctcagcctggagtgcagtggtgcgatcttggctcactgcaccctccgcctcccgggttcaagcgattctcgtgcttcagcctcctgagtagctgggactacaggtacccaacactacgtctggctaatttttgtatttttagtagagacggggtttcaccatgttggccaggttggtcttgaactcctgacctcacgtgatccacccacctcggcctcccaaagtgtgctgggattacaggcatgagccaccgcaccaagccacctttcataatttttcttttttataattttagagatgggagtggtggtgtcttgctgtgttgcccaagctggtcttcaactcccagcctcaagcaatcctcctgcctcagcctccaaaagtgctgggattgcaggtgtcagccaccatgcctggctggacatctccttataaagcttgaatccgactacctctccctctgttctaatgtccaccatggctccctgctactctgaggatcatgtctatacttgttaaggtggctctgcaccacagacctgtcacatctaaagaagattatgacaaatgcgtgggcagtaacaataacattgtaaatttgatcctctccggaattacctacagtctccctgaactggttgttctttctctgacagcctccaagcctttctgctgtgccctctgcctggaaccccttccctttcctcattctccatcctcctatctttcttctcattggagtctccctgtaatttatttatttattacattttttattttttatttttatttttgagacagagtctcactctgttgcccaggctggagtgcagtggcaccatctcggatcactgcaactttcgcctcctggattcaagcaattctcctgcctcagcctcgcaagtagctgggaccacagctgtgcgccaccaggcctggctaatttttgtatttttagtagagacagggttttgccatattggtcaggctagtctcgaactcctgacctcaggtgatctgctcaccttggcctcccaaagtgctagatttacaggtgtgagccaccgtacctggccttacttttttaagagacagggtctacctgtattgccctggctggagtgcagtggtgcgatcatagctcactgcagcctcaaactctaggctccagttatcctcttaccatagcctcccaggtggctaggactacaggcatgagccaccgtgcccagctaggggtctctctttaaagccactttttcggggaagcatcctctgaccccggaacctcaccaaggtttccctcattgtatttccactttgtggcctagctttgtcctctgagcactactgcaattcgctattatatatttgttttttgattttttagacagagtctccctctgtcacccaggctggagggcagtggcacgatcttacctcactgcagcatctgcctcccagtttcaaacgattctcctgcctcagcctcccaagcagctgggattacaggcgcccaccaccacgcctggataatttttgtatttttagtagagacagggtttcactatgttgaccaggcttgtctcaaactcccgacctcaggtgatctgcccacctcggcctgccaaagtcctgggattacagggttaagccaccatgcccggccttgctattacatagttgattctgtcttttgcatctgttcctctcactcggctctaagctccctggggtggcatggaagccagcatgtggaagtgggcacccctgtctgtaccccctagttcccagtatatggactggcacacaggggctgctcattcactctagttagaatggatgcttcactttcagcgaacatgccccctcctccaggaagccctccctgcccctcctcacctcctcagatcatcctcaaagggcaggaaaagccatttctttggcatgtccttgaggaacaggtcctgctgctcctccgtggagtcctgggacacgtacaccagggccagctgagccgcccgcagtacatagaactcatctgtgagccgcacgaagaagtccttgaggatgggcacgaaggcctggcactgtggacaagccccagcaccaaagaacagcagcaccagccggttctccagcctgcgactgacctcagcctccgtatccagctcgtcctggtcgctattgttgcggatcaggatgcggccagagaacagggaggccatggtaacctgggttgggtgctggggacagcgcggcgtgtggtccccggtctgctgactggctcctctcccagaaatagaaatctttagaaaaccagcttaggacttcactaatctgcctaaaccttgacctgaggggcctctaagggcggggggcagggctctctgtgtggcccttctcaggagagagccgcaaacgcattaagaaaacacgtaacagatgggcacggtggctcacgcctgtgatcccagcactttgagaggcagaggtgggaggatcatctgaggtcaggagtttgagaccagcctggccaacatggtgaaaccctgtctgtactaaaaaataaaaaaattagccaggcgtggtggtgggcacctgtaatcccagctacttgggcagccgaggcaggagaatcgcttgaagccaggaggcggaggttgcagtgagctgagattgtgccactgcactccagcctgggcgacagagcgagactccatctcagaaaaaaaaagaaagaaagaaagaaaaaaaaccaaaaaaccatgtagcagacagtgactcacgcctgtaatctcagcactttgggaggctgaggcaggaggatcacctgagaccaggagtttgagagcagcttgggcaacagtgtgagaccccatctctatgaaaaaattaaaaacttagctgggcatggtgttgtcatgagcctgtagtcccagctactcagctgagatggaaggatcacttgagcctgggaggttgaggctacaatgactgcactactgcactccatcctgggtgacagagcaagacctagtgtctaaaaataaaaaataggctgggcacggtggctcacgcctgtaatcccaaagctttgggaggtcaaggtgggtggatcacctgaagtcaggagttcgagaccagtctggccaacatggagaaaccccatctctactaaaaatgcaaaaattggccaggtgtggtggctcacgcctgtaatcccagcactttgggaggctgaggcaggtggatcacaaggtcaggagatcgagaccatcctgactaacacagtgaaaccccgtctctactaaaagtacaaaaaaaattagccgggtgtggtggcgggcacctgtagtcccagctactcgggaggctgaggcaggagaatggcgtgaacccgggaggtggagcttgcagtgagccgagaccgcgccactgcactccagcctgggtgacagagtgagattccgtctcaaaaaaaaaaaaaaagcaaaaattagaccgggtgtggtggctcatgcctgtaatcccagcgctttgggaggctgaggcaggcggatcacctgaggtcaggagttcgaaaccagcctggccaacatggtgaaaccccatctctactgaaaatacaaaaattagcggctcgtgatggcacatgcctgtaatcccagctactcgggaggctaaggcaggagaactgcttgagcctgggaggcagaggttgcagtgagctgagattgcaccactgcactccatccagcctgggcaacagagcgagactacatctcaaaaaaaaaaaagcaaaaattagccaggcgtggtggtgcatgcctgtaatcccagctacttgggaggctgagggaggagaattgcttgaacccaagaggcggaggctgcagtgagacaagattgtcccactgcactccaacctgggggatagagtgagactctgtctccaaaataaaaataaaaaaatttaatatctgacttttttgtatgtatattttttgagactgggtctcactctgtcaaggtgcccaggctggagtgcagtggtgtgatcatggctcactgcagccttgacctccagggctcgggcgatccttctatttcagcgtccctgttagctggcactagagttctgtgccaccacgtctggctaattttttgtatttttagtagagatgaggttttgccatgttgcccaggctggcctccaagtcctgggctcaagcaatcctccagcctcggcctcccaaagtgctgggattacaggcatgagcatgcaactggccacaccttttcataaatatattaaatcacattgattcacatggactctactagttacttcaaggtctaagtcagggtgagcatctgtgatattttagggtgtctcctatgatcaggatgtgatatgaaattatctttgatttccacaggggacaaagttccagggctagccaatgtctgcattcacagtgagaggacctgatgaattccagttagaggctaatgaaatgggccgggcacagtggctcacacctgtaatcccagcaatttgggaggccgaggcgggaggatcacctaaagtcaggagttcaagaccagcctggccaacatataatgaaaccacatctccactaaaaaaatacaaaaattagctgggtgtggtagcgcactcctgtaatcctaggtactcaggaggctgaggcaggagaatcgcttaaacccgggaggcagaggttgcagtgagctgagatcacgccactgcactccagcctgggttacagagtcagactctgtctctaaaaaaacaaaacaaaacaaaatggggggactgggcgcggtggctcatgcctgtaatcccagcactttgggaggccaaggcaggcgcatcacgaggtcaggagatcgagaccatcctggctaacatggtgaaaccctgtctctactaaaaatacaaaaaaaaaatagccgggcatggtggcgggcacctgtagtcccagctactggggaggctgaggcaggagaatggcatgaacccgggaagcggagcttgcagtgagccaagatcgcgcctctgtactccaggctgggcgacagagtgagactccatctcaaatgaaaggaagaagaagaagaagaagaagaagaaggagaaggagaaggagaaggagaaggagaaggagaaggagaaggagaaggagaaggagaaggagaaggagaaggagaaggagaaggagaaggagaaggagaaggagaaggagaagaagaagaaaagaagaagaagaaaagaagaagaagaagaagaagaaagaagaagaagaaaatgtatttttttttctccatcctcctgaattctgtctggaccacccacaccttaagattgtagatgtgtaggtgtagaaggctgaaagtcatggatattatattttgcatctccaactccaaccctgtcaaagggtagagactagttctgcccccccttgaatccaggtaggtttcatgacttgctttgacgtatcaaatgtggtggaatgggctaagcgcggtggttcagcctgtaatcccagcacttttgcaggctgaggcaggcggatcacttgaggtcaggagttcgagaccagcctagacaacaatggtgaaaccctgtctctactaaaaatacaaaaattagctgggcatggtggcaggtgcctgtaatcccagctactcaggaggctgaggtgggagaattgcttgaattcgggaggcggagattgcagtgagctgcgatcgtgccattgcactccagcctgggagacagagcacgactccgtctcaaaaataaataaataaaatagaatgtggtgaaatgtgtgagtttcaaagatgtcttcattttattttatttttcagagacggggtctcaatctatcattcaggctgaagttcagtggtacaatcatagcttactgtagtcttgacctcctggactcatgggatcctcctgcctcagcctcctgagtagatgggactacaggtgcatgccagcatgcccgtctagttttaaatttttttgtagaggtcgggtctcactcttttgcccatgctgatctggaactcctggtcttaagcgatactcccgccttagcctctcaaagtgctgggattacagctgtaatgtgcctggcctgaagagtatctttagtttccttctgcctctcattttactcttgaaactctattgggaccccatgtaagaaagctgatctaggcagggcaaatttgctcatacctgtaatcccagcactttgggaagctgaggcgatcagatctcttgatcccaggagttcaagagtagcctgggcaacatagcaaaaccccctctacaaaaaaatacaaaaattatctgggcatggtggtgcacctgtagtcccagctacttgagggtgctgaggctggaggatgacttgagcctgggaggtcagggatgccgggaactgagatgatgcctctgtactccagcccccaggcaatagagtgagaccctgtctaaataaataaataaataaataaatgcaagcagatctaggtatggcacagtggctcatgctcatgcttgtaatcgcagcaatttggcaggccaaggcaggaagatagcttgaccccaggagttcaagaccagcctaggcaatgtggcaaaaccctgtctctacaaaaattagccaggtgtggtggcacacgcctgtggttccaggtactcgagaggctggggtgggagcctctccctcctgagcccaggaggtcaaggctgcagtgagctgggatcgtgccactgcactccaaccttggccacagactgagaccctgtctcaacaataaaaaggaaacaaggggcggggcgcggtagctcatgcctgtaatcccagcactttgggaggccaaggcaggtggatcatgaggtcaagagatcaagaccatcctggccaacatggtgaaaccctgtctctactaaaaatacaaaaattagctgggcatggtggcacatgcctgtagtcccagctacttgggaggctgaggcaggagaatcgcttgaacccggcaggaggaggttgcaatgagccaagatcacgccactgcactccagcctggcgacagagtgagactctgtctcaaaaaaaaagaaaaagaaagaaagaaaagaaagaaagagaaggaaggaaggagggaaggaagatagaaagacaaaagaaagaaagagagagagagaaagaaagaaagaaagaaagaaagaagctctagtccagggctctgtgcctcttgtctgtagaggactaggaggtaaacactttcatctttgaagtccatgtggcctctgttgagaaccatagctctcatctttcctccttctgtagtgggttgaactacaggctccccacaaaaagatatatccatgccttcgcccccggaacctgttaatgggaccttgtttggaaggagtctttgcaggtgttacttagttaaggatcttgagatgacatcatcctggattatctgagtgggccctaaatccaatgactgatgttgtaaacgggagcgtgaccgctgaagcacagcatcacaggggcacgtttaggcctctggatggctgcgggcgggcctgactaatgtcaggccttccacaagaggtggtggagcagagtcttctctaactcccctggggaaagggagactccctttccaggtcggctaagtaatgggtgccttcccaggcgctggcgttaccgctagaccagggagccctctagtggccctgttcgggcatgacagagggctcacacttgtcttctggtgacttctcactgtgtcccttcagctcctacctctgtatggcctggtttttcctaggttataattgtagaacagagattattttaatattggaataaagagtaatgctacaaactaacgaatgattaataatattcatatataatcatatctatattctatttcttgtataactattcttattctatatattttgtttattatactggaacagtttgtgccctcggtctcttgcctcggcacctgggtggcttgccgcccacagaggtgatcagtccaagactacctggctagaaacgagcagagagcagtttggcccggaagcctgagttttactccctggtccacatctcagtttcctggggataggacagtccccaatccctcatctgaaatccctggggacagctgtgtttgtgaattgggagattttgtattttaggaaaacaactgggggcagaggctgctgtatacccgtgctgttttagggggctcagaaaataatacccaggccgggctcagtggctcatgcctgtaatcccagcactttgggaggccgaggtgggggatcacttgaggtcaggagtttgagaccagcctggccaacatggcaaaaccccatctctactaaaaatacaaaaattagccaggcacggttgtgtgcatctgtaatcccagctactcgggaggctgaggcaggagaatctcttgaacccgggaggcaaaagtcgcagtgagctgagattgggcaactgcactccagcctgggtgacagagcaagactccgactgaaaaaaagaaagagagagagaaagagagagagagagagagagagagagagagagagagagagagacagacagacagacagaaagaaagaaagaaagaaaaaaaacaccccaaaatgaagatctcagaagcaaaagtttttctctgaccttctcctgccctcttgtgtctcagatctattctcccccaaggctggccataaaaactagaatccctctttcccaaggtaggttttagaaactagaactcttggctgggtgtggtgcctcacgtctgtaatcccagcactttgggaggccaaggcaggcggatcgcttgagatcagaagttcgtgaccagcctggtcaacatggtgaaaccctgtctctaccaaaaatacataattagctaggcttggtggcatgcgcctgtaatcccagctcctggggaggctgaggcaggaatcgcgtggacccaggaggcggaggttgcagtgagccaagattgagacattgcactccagcctgtgtgacagagtaagattccatctcaaaacaaacaaacaaactggtaagatggagggggaaaagggaggataggaaaaaaggaaggggggaagagaggaggagggcagggaggaggagagaaaagggcagaaaggagagaaggagggagaaagagagaaggaggaagtggggtaagagaagagagaatcagagcacaagaaaggtggaggggaagtttagagaagaaaaaggaggaggaggggtaagaagagaggaaggaggagggaaaggaggagaggaggggaggagggacagggaacactcagctgacatttatgaatgaatgaatctcaattccaagtaagcatgacagctccagtcctcagtttctttcttccttctttctttgtttctttcttttctttctttctttctctcttctatttttttttttttaagacagggtcttgctttgtcacccaggctggagtatagtgacgcgatctcggctcactggatcctctgccttccgggttcaagtgattctgctccctcagcctccggagtagctgggattacaggtgtgctccaccatgcctgactaatttttgtatttttagtagagacggggtttcgtcatgttggtcaggctggtttcgaacttctggcctcaagtgatccacccaactcggcctcccaaaatgctgggattacaggcgtgagtcaccacgcccagcctgccctcagtttctttacctgtcaaatggggtgatcacagcggtgctacctggctaggtaagagtgcaactgcagttactggtcattgctgactcttccaggcccagaaagcagcaggccagtggctggctctgggcctgtcctccggatcttcctcgtgatccctcattccagccaccctgctgcccgcagggaccaatggcagcgtagggggtgagtgcctgcccagccctgtcctccaaatgcattggaatcaggcccgggccgcctcctaaggagaacgctggaaaggtcggccaaggagagcagaaaacaagcagtggtggagtcggcagtggggcagaggagggggagctggaagggaaggaccccaaagcagaagcccgcacagtaggcacagcgcacccaagaagggtccaggagtctgcagaaacagaaaggtccccggcctcagcctcctagtccctgcctgcctcctgcctgagcttctgggagactgaaggcacggcttgcagcttcaggtcagccagagaatggggttgtgcgtgcccccaggccagcgctggcagcgcctgggggagcatctaggaccccggggtgcaagtaaagggcctgtaggtgcttctaggaaggatggggacctggcgtgtggattttgtcctccctgggatcctggggtgtgacggtgagacttaaccgacaaggcttcgggacatggattaagaattagctgtgtccttgaatcacacgtgttaagaccgcggcggtgtttacagttagagacttctgaggccccaatggtgtgagttgagcactcccccgggccctggaacgtgtttttaagaccgaaagaggctttggggcttggatttaggacaagctggagcaagaatacagcccgcgcgggccgtgggtgtggactgggatatttttggtcccccggggtagagatcctgcacgccaactagggctcgggtcctgatatcttgcgagccacgccccaaggctgcaggacacgtgtgtttcctaaaaggagagggggtggggcaaggcttggttgtcatggagacagcggacgaccctggcgggccgttctagcacccatgtctctttggccgtcgcctctccggtccggttgcctctctatggtcgtggcttctggaagacggccggcctcggctctgcgggctgaggggcttcgaagtagacaggagggaagaggggcggggcctaggtcctaggggggccggagtgaaacccaggaggtggcgaccgagccaaagcctgagggcggggcccgtggccaggatagaacctgagcctgggaacttgggctaggcccggaactggggtggggcttgaacggattggggagggctctagtttcgggagggtggggcgtgtgcttattgcgggggggtggggaggcatatgtctaacctagggggtggggcctggctgagaggggcgggactcggggagagggcttgtacctgtgggctgggctagaagcataacctaagggcggggcccagtgagtggtgaaaaggccacggggtagaggcaggaccaggaggaaaggggacaggacgtgaagggtaattcggggatcgaggatagaggctagatgaaggcatgtggcgaggcctgacagtgaccgacaaggtggacatgctggctctgggggcggggactgttgtaagattggcagggaaggatgggctcaaaaatatggaatagagcggacccagggtccgggggcggagcctggccaggacctggccaatcccaggcctggggccctggtctggttcctagttagcgggcgggtgtaaaagcctggaaaggggcgatgcctggcctgaggagttgaccaatcccaggcctgggggcggagtctgactcggagcgcgttcccggactcgcggggggcgcagagccgaggcctgggggcgcggctcgctgtagaggcgggggcggtcgtggggcggagcgggtcgtggggcggggctggagcggcccgcggcctcagctctctctgcttccccaggatgcgggctccgggtgcgggcgcggcctcggtggtctcgctggcgctgttgtggctgctggggctgccgtggacctggagcgcggcagcggcgctcggcgtgtacgtgggcagcggcggctggcgcttcctgcgcatcgtctgcaagaccgcgaggcgagacctcttgtgagtgttgccgggatccgtccagggctgggggcggggctgagggctctgggggcgcacggtgcagggctgggttgcggggacggcttggagggtccggagagctgagggtgctttgtaggttgggggcggggctgggccgagggctgggcgggggcggggcctgagagggtgaccagttgggggtctctgagggggctacaggggacactttaaggatttctcgaggaagatgagtagcctctaaggtgcttcgggcgttgcaggctgcttaggagatgatctcaggggatttggggggcaatttgggggtctttgggcaactggtggaaattccagggagctggggctgactggaaatccgtggcggtgtgggggtctttttggagccgtgataactgtgagagacttcagggggctctccagtaggtcaccggggctcacagggacgacccaatagatagtctctggggggttgccaagacactttgggtctatctagggctttctctgagggatgagcgagctgctctataaaggacttcccgggtttctgaaggtgtgagtttcctcgggatcgtttacagctggggcactgtttgagattttggggtctgtgtgggactttgggtttgggagttgttcggagtgtgtcgggaggctgctgtgtattccaggacttgtttggggggtctcttctggagactgggacactggattcatgctaggggggcagattctggtgtcctgtgcaaggatccttggagggtttttgcggtgtctctgagggacttgctcaaacgagccgttgggggtccttctgggatgaaacaggcattgctgggggcttctatcagagcagacctcaggaacagcaccacgtgggagcaggtgagcgccggctagcggggcagggctcaacaccttcacagctccttgtaagatggagtagcaagagggactgaacccattgtaaggagggcacagagggtgtggagatgggaaagatcccaccgtaagttgactggttctgaactttctaaaactcaccccttctgcatgccatggccccctgcccccggctccttggttgttctgatgtggaaatctgactgtgccctctgctcagacaccttccatggccagcccatccttggcagaaggaagactcagcccctagctgggcactcaaggtcctaccatctgttccctgcccacctgccactccccccatccatatgttcacctggtcttcagaaagacttgcagtgtcaagctcaagctgcccagaacatactggaccccttttagccagggcaggctctccctctgggaacctttgctgaattttcctgctcagcaccctcccatagctccttgttgcccttagaattgacgccatactggccgggagcggtggctcacgcctgtaatcccagcactttgggaggccgaggcaggcagatcacgaggtcaggagatcaaaaccatcctggctaacacggtgaaaccccgtttctaataaaaatacaaaaaaattagccaggcgtggtggtggacgcctgtagtcccagctactcgggaggctgaggcaggagaatggtgtgaaccccggaggcggagcttgcagtgagcggagatcatgccactgcagtccagcttgggcgacagagtgagactccgtctcaaaaaaaaaaaaaaaaatagaattagaattgaggccatactcctgagcattgcgcacgaggtccctgaccatgtcccagcctccgcttacttcccttttgtcgcctagctgcacttaccttttgtctattgctcatttgtttgtttgtttgaggcagagtctcactccgtcgcccaggctggagtgcagtggtgcgatcttggctcactgcaacctctgcctcccaggttcaagtgattctcctgcgtcagcctcccaagtagctgggactacaggcacgtgccaccatgcccagctaatttttgtaattttagtagagatggggtttcaccgtattaaccaggctggtctcaaactcctgacatcacgtagtccgcctgccttggcctcctaaagtgctgggattacaggcatgagccaccatgcctggctcccttttttttgagacagggtgtcttctctgttgcccagggtggaccagcctccatctcctgggctcaagcaatcctcccacctcagcctcctgactagctgggactacaaacgcctgcctccgctcctggatagttaatagaatgttttttatagagatgaggtctcgctatattgcccagtctggtctggaactcctggctttaagcgatcctcctacctcagcctcccaagtggctgggatgacaggtgcacaccaccacacctggctaatttttttattttttgtagagacgtggttctgccacgttgcccaggctagtctcgaactcctggcctccagcgatcacccaatttcagcctcccaaagtgctgggattaccgcgcccagcgtgaactgctttgaaccatattgtctacttgactttcagacagccagatggtgcagttggagttgcaaactcatgtgaggttatgagtcatcgatcgagatttcaccccttcctcctaacagcaaggtctgagataccaaatttccttttagctcctggtgtgtgtatgttaaggaaagatcttattttgatttccaattcacctttatgttgaatgggcatgctttgaggtcttatcagactcaaacctgcttgtctgacacctaagctgtccccctcctggggctacaatgacattttggcctctggttggtccttattttctgatcaccttgttgctacattaataaaaaattaactcggctgggcgcggtggctcacacctgtaatcccagcactttgggaggccgaagcgggtggatcacctgaggtcaggagtttgagaccagcctggccaacgtggcgaagccttgtctctactgaaaatacaaaaattagccgggcgtggtggtgcacgcctgtaatctcagctacttgggagtctgaggcaagacaatcacttgaacctgggaggtggaggttgcagtgagccaagatcgtgccattacactccagactgggcaacatgagcgaaactccatctcaaaaaacaaaacaaaacaaaacaaagatttaactcatttaacccagcatttttagttgttttctttctttgctttgggattagaagtttcttgtttttttgataaagtctcactctgtcacccaggctggagtgcagtggtgtgatcatagctcactgtagcctcaacttcctgggctcaaatgatcctcccatcacagcctcccaagtagctgggactacagatgcgtgccacaacagccagcagattttgtttattttttataaaggagaggtctcactatgttgtccaggctggtcttgaactcctgaggtcaagagatcctcctgcctcagcctcccaaagtgctaggattataggtgtgaaccaccacatctggcctgttttcttgccttttaatcttgggcctctttctagactgtgggccctataggggcacaaaaggagactgtgtcagtcttggtgccactgtggccctgcgccccactcaggattggcgcacagcggtagcgcaggacatgtttgttaggtggaaggccatcccttccttcttgggttcacccaggcccatctctccctcctctccagctctgctcccatgggccctgtgggtgtccatgcctggttctaagttcctgacatggcttgacatacttgcctgtgggtggcagctttgaagatggccccagggatccctgtctcctgctcttcccacttgtatggtcccctccctttgagtgtgggctggacctagtgacccctttcttttttttttttttttttttgagatgggagtttcgctttgtcacccaggctggagtgcaatggcgcgatctcggctcaccgcaacctccgcctcccaggttcaagttattttcctgccttagcctcctgagtagctgggattaccggcatgcaccaccacgcccagctaattttgtatttttagtagagacggggtttctccatgttggccaggctggtcttgaactcccgacctcaggtgatctgcccgcctgggcctcccaaagtgctgggattacaggtgtgagccactgcgccctgttttttttttgagacggagtcttgctctgccacccgggctggagtgcagtggtgtgactccactgcaccctccagctcccaggttcaagcaattctcctgtctcagcctcccgagtagctgggattacaggtgcctgccaccacacccggataatttttgtatttttagttgagagggggtttcaccacattggccaggctggtctcaaggtcctaacctcaggtcatccgcctgccttggcctcccagaatgctggtattacaggctgaaccactgcgcccagccctagtgactcccttctaatgagtaaaatacatcagaattgatggaggctgggtgcagaggctcgtgcatataattccagcactttgggagcccaagatgggaggattgcctgaggccaggagttcaagaccagcctgagcaacatgatgagactccatctctacacgcaaaaaattagctgggggagtggggctctcctgtggtcccagctactcaggaggctgagtgggaggattgcttgagtccaggaggtcaaggctgcagtgagccatgattgccccactgcactccagcctgggtgagggagcaagactctgtcttgaaaaatgaaggggtgctgacaaatcccatttaacacgtgagagaacagaggcacagagaggggaggttatttgcccagaaacacacagccggggaggcacaggactccagagcatgtgctcttagccactgtgccgcactggagtggttggggtgctaaatttagaccttggcttcagaaaatatttcagcaccctgccctgactctcctaacatgccctgtacttcctgcatgaaatctgatcgtattcatccttgttgatttcttccgccctggagtcctgggcccagagctggacagtgggctcattgtccccaggctgggggtggcttgagcagctgccaggcagggctgcctaggcatgtggctggaaccaagtacaggaatccactgcctgctggtgtgggcatccttgagagagaacgagtgagaccaagagaccgggaggctgggggtgaatcctcgtgttcccacatctagctctggtgtttagcctgacggtgaccaactgtggcctcagttcctgtttcttgttgttgtgttgcctctggacgggcaccctactggcaggggctgtttcctgtggttactccctcaataacagccctctccccatggatgtaacatttgtaccccatcatggagttcttggggtgctccgtcaaattcacccacaggaagcccttagagcagaattgggtgtatactaggtgctccaggctgggcatggtggctcatgcctgtaatcccagcactttgggaggctgaggcgggctgatcacctgaggtcaggagttcgagactagcctggccaacgtggcgaaaccctgtctctactaaaaatacaaaaaaattagctgggcgtggtagcgggcacctgtaatcccagctactcgggatgctgaggcaggagaatcgtttgaacccgggaggcagaggttgcagtgagctgaggtggcaccactgcactccagcctgggtgacagagtgagactctgtctcaaaaaaaaaaaaaaaaaggaaaaaaaaagacgcaggcattgggcacctgctgtgtgcctcatgggcacttggcctgccactggctacgtcgccagcacttgataaatgctttgtaataagtctgccagggattagagggaccctgggaggaggctttgtttctgggttgttctgtcctcaaattgctctgtgaccttgggcgtgtccattccccactccgagcccccagttcattcattatttgacaaatggggatctgagggacctattttggagggtggatataaggttagcacagggcatggcagatagtaggtgcttaataaacactgagaatgatcatctgtttttttttttttttttttttttgagacatggtctcacactgtcacccaggctggagtgcagtggtgcaatcttggctcactgcaaccttcacctcccgggttcaaacaattcttatggctcagcctcccaagtagctgggactataggtgcccaccaccacacctggctaatttttgtatttttagtagagacggggttttgccatgttggccaggctggtctcgaactcctggcctcaagtgatccacccaccttggcctaccaaagtgctgggattacaagtgtgagctactatgtctagctgagaatgattatcttggctgctctgtttattggttgaatggatgagcagcgcttttttttttttttttttttttttgagactgaatcttgctcgattgcccaggctggagtgcagtggtgtgatctcagctcactgcaacctccacctcatgggttcattctcctgcctcagccttctgagtagctgggattacaggtgtgcaccaccatgcctggctactttttttgtatttgtagtagagacagggtttcatcatgttgaccagggtggtctcaaactcctgacctcaggtgatccacccaccttggcctcccaaagagctgggattacaggcatgacccaccgtgcctggccttctttctttctttctttctttttttgagacagggtctcactctcattgcccaggctggagtgcagtggtgcaatcttggctcactgcaacctccacctcctgagttcaagcaagtctcttgcctcagcctcccgagtagctgggattacaggtgcccgccaccatgcccggctaatttttttgtatttttagtagagacggggtttcaccatgttgggcaggctggtcttgaactcctgccctcaggtgatccacccacctcagcctcccaaagtgctgggattacaggtgtgagccaccgcacctgccgcccacctttttctaaaataaatttaaaaaattattttaacatagagatgaggtctcactatattgcccaggctggcctcgaactcctggcctcaaatagtccccctgtcttggcctcccagagtgctggaattacaggagtgagcccctacacctggccctgaagtgttgacattgaactcaactagcagcactaaaacccacgcctgaagaaagctgctgtaacacacatattttctccatgaggcacatcacaccagacaagcgcctcagccctgtgcttgggggtcattttcaacagcgaagtcaccagcaaaaatcacaaaaatgcagctgggcgcggtggctcatgcctgtaatcccagcactttgggaggctgaggcaggcggatcacctgaggtcaggagtttgagaccagcctggccaacatgatgaaaccccatctctactaaaaatacaaaaattagccaggtgtggtggcaggcacctgtggtcccagctactcaggaggctgaggcaggaaaatcgcttgaacctgggaggcggagtctgcagtgagccaagattgtgccattgcactccagcctgggcgacagagcaagactccgtctcaaaaaaaaaaaaaaaaaaaaggcacaaaaatgcaaaaaacatggcactaaatagactgtgaaaagggtgcttgtttacaatgtgagagctgaattaaggaggcagagtgggccagatgcggtagctcacgcctgtaatcccagcactttgggagtctgaggtgggaggatggcttgagcccaggagtttgagaccagcctgggcaacatggcgaaaccccatctctacaaaaatacaaaaattagccaggtgtggtggtgtacgcctgtagtcccagctactcagggggctgaggtgggaggattgcttgagcccaggaggcagaggttgcagtgagcggaggttgcagtgagccgagattgtgccactgcactccaccctgggcaactgagtgagaccctgtctcaaaaaaaagaaggcagagtgttgtcttgatgacttcagatgggaacatgcatgttggcaattctgatttttcacctctccacatgtgtttgagtatggcggtgaatggcagctactcaggaggctgaggcaggaggatcacttgagccctggagtttgaggccgtagtgagttataatggtgccaccgcactccagactaggcaacagagtgagaccctgtctctaaacaataaaaaatttaaaaaattatcagctgggaacagtactcacgcctggaatcctagtactttgggaggccgaggcaggcggatcacctgaggccagaagttcaagaccagcctggccaacaaaatgagatcccttctctacaaaaaaataaaacaaaacaaaacaaacccacaaaaatccctttactggcaattttggagatgcagggaggcacaaaggcctgtcagtgtctttgtactggatttgctgtctttgtcatgaaatcactgaattttcccacttggtttgagccccgttagtcatcagcctgcagcggggggccccattcttgtgcaggctgcccagttttctgttgtaaagacaatccattgtataggtcatccctcccctgcttagggcgtttggtgtttttctgatcttctgcactttggaagctacaatgaatagcactgttatttcccatatgcgaatttaatatgccaaactttttattttttaaatttttgagacatacttcatattctattgttgtttctttctccctctctctctcaatttttttaagatgagtcttgctctgtggctcagctggagtgcagtggtgcaatctaggctcgctgcaacctctgcctcccacattcaagtgattcttgtgcctcacacttttgagtagccgggattacagggacccaccaccacgcacggctaatttttgtatctttagtagagacggagttttgccatgttggccaggctggtctcaaactcctggcctcaagtgatctgcccaccttggcctcacaaagtgctgggattacaggcgtgagcccctgtgcccagcctggtctgctctttggaagctacagtgaatagcactgtcatttcccccattcgactttaagatgccaaattttttatctttcgatacaaaaaaatttttttttgagacggagtctcactctgtcacccaggctggagtgcagtggcatgatctcagctcactgcaacctccacctcccaggttccagtgattctcctgccacagcctcccaagtagctgggactgcaggaatgtgccaccatatccggctaatttttgtatttttagtagagacggggtttcaccatgttggccgggctggtctcgaactcctgacctcaagtgatctgctcacctcggcctcccaaagtgcacagattacagacatgagccactacacctggcctattttttaaaaatttttgagacatatatttctattgtcatttctttctcttttttttttcatgaagaagttttactctgtcacccaggctcaattgcagtggcattatcatggctcactgcaaccctgacctcctaggcccaagcgatcctcctgtctcatcctcctgagtagctgggactatacatgccacaatggccagttaatttttttctttttttttttttttttgcagagatgaggtctcagtttgttgcccaggctggtttcaaactcctgagctcaagtgatcctcccaccttgacctttcaaagtcctagcattataggcgtgagccaccgtgtccacccaatttttttaaaaattttaattttaggctgcaggttgcacgtgctggtttgttgcattggtatattgtatgatgctgaggtttgggcttgtaatcatcccattgtccaggtagtgaacagaatagaatatccaataggttattttcagctgccccttatggagttcccagtgtctgttgttcccatctttgcgtccgtgcgtattcaatgtttagctcccacttataacgaaaacgtggtatttggatttcttttttttttttttgagatggagttttgctcttgttgcccagcctggagtgcaatgacgcgatctcggctcaccgcaacctctgcctcccgggttcaagcaattctcctgcttcagcctcccaagtggttgggattacaggcatgcgccaccacgcccggccaattttgtaattttagttgagacagggtttctccatgttggccaggctggtctcgaactcccaacctcaggtgatccatccacctcagcctcccaaagtactgggattacaggcgtgagccactgggcccggcggtgtttggatttctgtttttgccttaatttgctcagggtcatggcctccagctgcatccacgttgctccaaagcacatggtttagttcctttttttttttttttttttttgagacagagtctcaatctgtcacccaggctggagtgcagtggcgcaatctcggctcactgcaacctctgcctcctgggtccaagtgattctcctgcctcagcctcctgagtagctgggattacaggctcatgccaccacacctggcctccatttacattttttaaaaatgattttaaaaaatttctgagatagggtctcactcccataacctaggctggagtgcagtgacacaatctcggttcactgcagccttgacttcctgggctcaagcgatcctcctgcttcagccttctgagtagttgggactacaggcttgcgccactaccctggctaatttctgtatttttagtagagctggggtttcaccatgttgcccaggctggtctcgaactgctgggctcaagcaatcctcccacctcagccttccttccaaagtgctgggattacaggcatgagccagcatgcctgcacggctgattgacattttttgaagttctctccttaaggagggaactctccagttggagatgttaatttatcagcagcccatgagccacccagagagcagcaggacaggtccctgcagggagacctggtgggccagaacctgcccggggccccttagatcgggctggggccacgggtggctgctctctccctaggcctgcaggattggaacctgatctgagagtcccagatgcctctcttccttcgagattatttgtagcaagctctctgtgctccaggagagctgggtcttgggcggtctcctcccctgctgcctctctggtactagaatgtaacagatgcatgccctgtctacccagtatagggagggacagaccaaggacacggtggtaaatgagtacattgcacgtggcgtttaaagactagaagtgcccgccgggcgcagtggctaacgcctgtaatcccagcactttgccggggtgaggcaggcggatcacctgaggtcaggagcttgagaccagcctggccaacatgacgaaactccgtctctactaaaaatacaaaaatggccaggtgtggtggctcatgcctgtaatcccaccactttgggaggccgaggcgggtggatcacgaggtcaagaaatggagaccattctggctaacatggtgaaaccccgtctctactaaaaatacaaaaattagctgggcgtggtagcatgtgcctgtagtcccagctacttgggaggctgaggcaggagaattgctggaacccaggaggcaaatgtttcagtgagccgagatagcaccactgcactctggcctggacgacagagcaagactctgtctcaaaaaaaaaaaaaaaaaaaaaaaagggtggggagagaatggagcgggaggagggtctgtatcaccacagggtcttggctagtgtgggctttgcactcagtaggtgctcaccatttcaagaatcagagttcatgcttctgcaactggctgctagggagggcagatgccctaggtactggacccaggggcatgaaatgaacattggtccaccctctattgactgagcacatactccagcagatgcatagatgctagagatgcacagatgctagagatgcacagatgcacagatctcctgcgtgctcacaatgccaatgaatgatggagggaatgaatgaatgagggaatgagtgaaggagggaatgaatgaatgagggaatgagtgaaggagggaatgaatgagggaacgagtgaaggagggaatgaatgaatgagggaaggagggaatgaatgaatgagggaatgagggaatgaatgaacaaaggagggaatgaatgagtgaaatgagtgaatgaatgagggagaaatagacccatgacctggtggctctgcacaaggctttgatggggagagtgaaggtgacagggagggctcccagggtagaacagagagctccctgacaccagccagtgccccactgaccaagtgcggccccattttgagggagctgtgattggggagcagtaagcatggtgcatgggccatgtggtgcctggaaggtttcctgagggaggcaatgaggctgctggggggagctctgtgagtgggtgtgtgtgtgggggctgtgctcagctcagtgagcttgtgggtcatggtgggtagggaagtattgtcactaggagttcagcagcctgctcatatcccaaaagtagccagaggggccttctaggggcttccagggtaagtggtttgacccatgcaggaagtctcatgaaaaccctggacctttgtttttagaaattgcggatgctctcccccaacagaccccggcaccctcctatctccatggctttcattgtgaacccctcctggggcccatgagcctcatggagccggcccctgcccacctcagacttcattcccctttcatgtcgctttcccctaattccccccacactgacctccacgctggtcctcaactgtgccccattcccaggcctgttcccaccccagggcctttgcactggctgcattccggatgtacccacagcgactcccttttgcctcaccaggtcctgctcagatgccgcctgcctctctcaagggcctcccctgcctctgcccttggtccgtgtgactgaccacatcaccccttgcagtcttgtcaccatccagcacggcctggtattcagtcatatacatggaaggggtctctcttcccagaggactgtgaaccccagagggtggggcctggtggtctggatgctctgtccccagagctgagaacagtgcctaaagcacaacagacactggtatgcaccagctgcctgaatgaatgaaggaaggagggaatgaatgaatgaaagagggagtaaatgataaatggagggaaagaataaaggagggaatgaatgatggagggaataaatgcatgaaagaggtaataaatgaacaaaggagggaatgaaagagtgaaggagataataaataaggatggaatgagaccagatgcggtggcccacgcctgtaatcccagcacattgggaggccaagggaggaccacctgagtccagtagttcgagaccagcctggccaacatggtgaaaccctgtctctacaaaaaatacaaaaattttgctggccctggtgacgtgcacctgtagtctcagctactagggaggctgaggtgggaggattgcttgagcctgggaggtctgcagtaagccatgatcatggactctagtctgggcgacagagtgagaccctgtctcaaaaaaaaagtactgaatgagtgaaggggggaaagaatgaatgacggagggagggaaagagtgagtgaagtagggaatgagtgaatgaagatggaatgaatgatggaatgaatgaaggagagaatgagggagggaatgaaagagggaaagaacgaagaagagcatgaatgaatgaccgagaggatgaatgaatataggtgctgaagtccactgtgaacattttggggggtgtgagcagccattgcagggatctggggaggcctgggaaaggcaggggagatccaaaggatggatttggtgattttgatgcagaagctggagggaggcagtggccgggccaggctgaaacaggggcaggtgggtggagcccctgccctgtgttggtcagggctgggcagggccaggtactacaacaaacacaccccacattccagtggcttaccccagtacaaggttattggttcccagagccaggggcgcagggtggtggggcagggagccaggaaggggtggggaccactcatttctccagcttctcaaccaagaaaatctgaatttccagcttctgtgatctaaacttttcctttcctttccatttcctttttgtttccttttttttttttttttttgatggagtcttgctctttggcccaggctggagtgaatttgcgtgatctcggctcactgcaacctctgcctgctgtgtttaagcaattctcctgcctcagcctccggagtagctgggattacaggcgcccaccatcacgcctggctaatttttgtatttttagtagagacggggtttcaccgtgttagccaggatggtctcaatctgctgacctcatgatccacccgcctcggcctcccaaagtgctaggattacaggtgtgagccaccacgcctggcctaaagcatttcttgtttgtttgtttgtttgtttgtttgtttgtttttaaagttcattcttggctgggcatggtggctcacacctgtaattccaatactttgggaggccagggctggtggattacctgaggtcaggagtttgagaccagcctgaccaatatgatgaaaccccgtctctactaaaaatacaaaaattagtcgggtgtggtggtgggcacctgtaatcccagctactgtggaggctgaggcaggagaattgcttaaacccaggaggcggagggtgagccgagattgcaccactgtactctggcctgggcgacagagtgagactccgtctcaaaaaaaaaacaaaaaaacagttcattctcattcatctaacagcaagtggtggcccgcctgcctccacacaatcattcaggaacccggctcctttcactgggggctctgcagttccctggggcctctgcccgttatatctactagcgagtggggaaggggaacttggaaccctccatctgggcttggcattggtccttacaccccccatccactggcacatctcctggccctacctggggcaggggcaatccctccccagttgggggcacacgtgctagatgcttcagccatctgtccctggtgccacccagtgacctgggggcagaacagctgcccagctcggggctggaccctgggggtcctggttagggtggtctgagcatgaagagtccaggctggaggtgctgggggatggtgtcaggtgctccagacgtcgcaggggacagaaaggaggatgggttcaggccccagctcccccagggccaccaagccagctggggtatgggggaggacagggtgactggtttattacgctttgagaatctaccttcttcctggctggttggtaaatggcccttgcccttggtccactgagagatccagccaccaaaagtttcaccatagacctcatcaaagcccctggctgccctggggtcctccagcggggaggctgaggctcccagaggccaggcggggcagggcaccagtgacgctgtcccctccgtcctccctcccagcggtctctctgtgctgatccgcgtgcgcctggagctgcggcggcaccagcgtgccggccacaccatcccgcgcatctttcaggcggtagtgcagcgacagcccgagcgcctggcgctggtggatgccgggaccggcgagtgctggacctttgcgcagctggacgcctactccaatgcggtagccaacctcttccgccagctgggcttcgcgccgggcgacgtggtggccatcttcctggagggccggccggagttcgtggggctgtggctgggcctggccaaggcgggcatggaggccgcgctgctcaacgtgaacctgcggcgcgagcccctggccttctgcctgggcacctcgggcgctaaggccctgatctttggaggagaaatggtggcgggtgaggccaggcgtgggcatcaggtgggcggggacccaggactggcccctgggcgggcggggagatgctgcgccccaggcctcggaaggcggccgccctggacgtgggcatgaggtgcacggtctgggtatgccccgggcagggagttggtgcatcccaggcctcgggagggggcctgtccggcggtgaccatgacccatgtgttggggaccacagcggtggccgaagtgagcgggcatctggggaaaagtttgatcaagttctgctctggagacttggggcccgagggcatcttgccggacacccacctcctggacccgctgctgaaggaggcctctactgcccccttggcacagatccccagcaagggcatggacggtgagtcaagggtgggacccctgctctatcaactggtttcctacccgcccaggccccgcccccaacttccaggccccaccccccaatgctcaggccccacccctaacacctgtatctcctgcagatcgtcttttctacatctacacgtcggggaccaccgggctgcccaaggctgccattgtcgtgcacagcaggtgaggggcccacaggcataatgccctcagccgctgagagtgacccaggctatcttgccagcctgacctgcccctcagctcctgtgggcatctccatgttaccctggggacagagagggcagctggtgtttcctgagcacttgctctgtgtccagaccagggccaagccctccacgtgtaaactcattgcaaccctcataactgcttggggctggacaaaggcatcacacccattttcacacccatcttgggacccggttgccctgtgcccactactctggggcccctctcatccccccacctgttcaccacatccatcccaccagcaaaacccgtcctctccatctgtctacttttttccatgccccccatctggacctgtgccagcccctcctcgggctcctcctgctccccccactctctcctccacccacgatggcccagctcctgtcagcagctacaggaggtttgaaaatcctaaatcagacctcccctgtcccagacctccctgcatctaccgtgaccctcagaataaaaccctctctcgggctaggcgtggtggcttacgcctgtaaccccaacactttgggaggctgaggcaggcgggtcacttgacgtcaggagttcgagaccgtcctggccaacgtggcgaaaccctgtctctactaaaaatacaaaaattagctgggcgtggtggcacatgactgtaatcccagctactcgggaggctgaggcaggagaatcgcttgaacccagaggcggaggttgcagtgagctgagatcccgccactgcactccagcctggatgatacagcaagactccctctcaaaaaaagaaacaaataacaaacaaaaaccctctctcagtttgggtggcttctgccacttccctgatgtcattttcctccccttcaccccgtactcactcctcctcagccccccaaactcttcaaacccatacactccttccggcctcagggccctcacatgtgctgtgcctgggcactcttccatagctcgcccccacagctctttcttgctaggtctcggatcacacttcacctccctagacaggatcccccaacccccctggctgcattaccatcagcccctctatgccccttgaccctattatatccctcgtgacacctaacaccaccaacaattgttggttgcgtgtttccttcctgccagcctgtgaactcatgcgaactgggctggctttgcctgggtccacatgcagcatgcttccccatgcctgtaccctgggggatttaggtcccagcctctgccctcccggctccccctccccctgcaggtactaccgcatggcagccttcggccaccacgcctaccgcatgcaggcggctgacgtgctctatgactgcctgcccctgtaccactcggcaggtactacggcctgggtagggaatggtgggtgggggcgggggaccccttaccaaggccaccctctgcaggaaacatcatcggcgtggggcagtgtctcatctatgggctgacagtcgtcctccgcaagaaattctcggccagccgcttctgggacgactgcatcaagtacaactgcacggtcaggccctgccctgttctgtctagaccccgcccctcccagccaggcctcaccccctcccaatcaggccccacctcctcccggtgaggccccgtacctcccagcaaagccccacctcctcctggtcaggtcccgtcctctcccagccaggccccgccccccgaccaggctctattcccttaactcccttatgtgcgccctcctgtccacctgctggcgcaacctgctcccccgtctctaggggtggggtggggagcggggcttaaggaatggctgttcaggatggggacagagagggcaagtagtgtttcctgagtacctgctctgtgtccagaccagagctaaaccctccacgtgtaaactcaatgcaatcctataactttggagggtggacccattttgcagctggggaaactaaggcttgtaatgcggctaggattgggcccagggtgcctgagctccttaaggcaatgccttccccatgccttgtgccctgtgggtcttccctgctgctgactgtagggaattgagaccctgggatgggaagggcgatgagtctggggcttccaggtgaggaacgcgtgaggcggaggtggaggcatctgctgtcccggagaggagagcaggcagaggttaagaacaggaattcttctttcccctccacagtgagaggagaccaggctgagggtttcagtgctgtaatgtggggcaggatacaggaaatacaggcgggaggtacaggaaacaggtatggagcccggagggaatagcaaggctgactgggaaggattgggtgagaggttgtccagggactgtggcaagttggcagatgcagattggacagatggggcccagagagattcaggccaggtcacacagctgagcaggggttgggggctctgggctgagcatcttggggtataccacaaggtccacagctgtgcttggcttcgcttttgaggagttttggttctgtttggagggtcttgggaaaattactaatctgcatgttgaaatgcaaaagtatatttttattattattattattttttgagacaggatctcactctgttgcccagactggagtgcagtggcgctatcatggctcactgcagctttgacctcctgggctcaagtgatcttccagcattggcctcccaagtagctgggactacaggtgcgcaccaccacgcctggcccacttttgaattttttttgtagagaagaggtttcgccatgttgcccaggctggtctcaaactcctgggttcaagcaatccacccacctcggactcccaaagtgctgggattacaggcatgagccactgtacccagcccaaaattatcttttaaaaaaaattacagagagtagcaaatacacataaaagtggacagaaaagtatagagagttctggtgcacccctcagctggacccagaggctatcagataccctgtcctgcccctccccacctccccacatcctcccctcggtgatggcataaagcatccctcagacggcatcatgtttcctgtgtagctgtttcactataacctttgaaagatgagtacttgttttttcaaattaaagtgaaattcatataaattagccatattaaagtgaaaaatttggccaggcacagtggctcacgcctgtaatccctgtacttcgggaggctgagatgggcagatcacttgaggtcaggagtttgagaccagcctggccaacagggtgaaaccctgtctctactaaaaatacagaaatgtagcctggcgtggtggttggtgcctgtaatcccagctactcgggagactgaggcggaagaatcgcttgaacccgggaggcagaggttgcagtgagccaagattgcaccactgcactccagcctgggcgtgacagagtgagactccatctcaaaaaaaaaaaaaaaaaaaatttggccgggcatgatgatacacacctgtaatcccagctgcctggaaggctgaggcaggagaatcgcttgaacctgggaagcggaggctgcagtgagctgagatcgggccactgcactccagtctgggtgacagagtgagattccatctttaaaaaaaaaaaaagtcagtaatttggtggcattcacaatgtacaatcaccatgtctatctagatccagaacattctcatgccccccaaaggaaatcccatccccagttactccccatccctccacccccagcccctggcaaccactattctgcttcctgcctctatgatttgcctgttctggacatttcagatcaatggagtcagacactgtcgccttttgtgtctggtaagcattgtttttaagtgacagtgatatctcagtgtcatcaggaatctgggcagtggctcaattctgtctcacaatgtcaaaaatgtgttttttcttatttccataattaaatacacaaccagcattatgactggttgatgtgtcttgtaagaattcttggctgagcgcaatggctcatgcctgtaatcccagcactttgggaagccgaggcgggaggatcgcttgagcccaagagttgtagaccagcctgggcaacatagtgagtccctcatctctacaaaaaaattgaaaatctagctggttgtggtggtttgtgcctgtagtcccagctgcttgggaggctgaggtgggaggattgcttgagcccaggaggtcaaggctgctgtcagccgtgattgtgccagtgtactctagcctgggcaacagagcaagcccctatctcaaaaaaataaaaaaaagaaaagaaaagaaaagaaaatatttcatctgtaggtgccttttctctttctgtctgtctctcttccctcttggaatttatttattacagaaattgagatagtgtccagaacaggtttgactcttaacatttggggctggatcattccctggggtgggacgtgtcctgtgcattgtagcatatatttagcaacatccctggcctccctgcaccagatgccagtagcagtccccttcccccaagttgtgacaattaaaaaaatgtgtctagatgttgctaagtgtccctgggggacagaatggtccccgcttgagaatcgctggtctatatattttatcggcttcaaactcaacttttttggcaaagattccttatgggtggtgtggtgtcctcccactgggaagcccgtcatgtctgatggtctctctttgtccttgacacaccatcttgcattggttactacttactgtctcctgggccttggaagctcattctgtcagtttcctagaagtggaatttctgtgtcaaataaggcacacagtgaacattgagaggctttttaagaaatagaggatgggaaattagctaggcatggtgggcgcctatagtcccagttatttgggaggctgaggcgggagaatcctgtgaacccaggaggtggaggttgcagtgagccgagatcgcaccactgcactccagcctgggtgacaagagtgagactccatctcaaaaaaaaaaaaaaaaaaagaaaaagaaatagaggacggggccgggcgcagtgtcttacgcctgtaatcccagcactttgggaggccgaggcgggtggatcacctgaggtctggagtttgagaccagcctgaccaacatggagaaaccccatctctactaaaaatacaaaaattagcagggcgtggtggcacatgcctgtaatcccagctactcaggaggctgaggcaggagaattgcttgaacccgggaggtggaagttgcagtgagagccgagattgtgccattgcactccagcctgggcaacgagagcgaaactccgtcttaaaaaaaaaaagaaagaaatagaggatgggaaattagccaggtgcggtggtgggcacctgtagtcccagctatttgggaggctgaggcaggagaatcctgtgaacccaggaggtggaggttgcagtgagctgagactgtgccactgcactccagcctgggcgacagagtgagactccatctcaaaaaaaaaaaaagaaaaatagaggacagggccgggcgcggcggctcacgcctgtaatcccagcactttgggaagtcgaggcaggtggatcacctcaggtcaggagttcaagaccagcctggccaacatggtgaaaccccatctctacaaaaacaattagccatgcatggtggcgggcacctgtagtcccagctacccgggaggctgaggcaggagaatcgtttgaacccgggaagtggaggttgcagtgagccgagatcgcgccactgcactccagactgggtgagagagcacaactccatctcaaaaaaaaaaaaaaaaaaaaaacaggacagaatctctaaaggtgatgtttaataaggacacaaggagaaaacaagagcatacatttatttgggttcagaaattacatctcatgagaaactgctcactgctattttatctgtagcagcagttgcagtctagccattctcatgggggcagcaggctataatctagaaccttacttttttttttttttgagacacagtctcgctgcatctcccaggctggaatggagtagtgtgatctcggctcactgcaacctccttctcctgggttcaagtgattcccctccctcagcctcctgagtagctgggattacaggggtctaccaccaagcctagctaattttttgtatttttagtagagacggggtttcaccatgttggccaggctggtctcaaacttctgacctcaggtgatctgcctgccccagcctcccaaactgctgggattacagccatgagccacagcagccggcttttgttgcttatttctttcttactgtacacgtgctaacaaaaaagggatggtggagcccccagggtggacatgcccagccccaggtagctgtttcttttttttttttttttgagacggagtctcgctctgtctcccaggctggagtgcagtggcgcaatcttggctcactgcaagctccacctcctgggttcccaccattctcctgcctcagcctcctgagtagctgggactacaggcgcccgccaccacacctggctaattttttttttgtattttttagtacagacagggtttcacggtgttagccaggatggtctcgatctcctgacctcatgatctgcccacctcggcctcccaaagtgctgggattacaggcgtgagccaccgtgcctggcctttttctttttctttttctttttgagacggagtctcactctgttgcccaggccagagtgcagtggtgcgatctcagttcactgcaacctccacctcctgggttcaggtgattctcctgcctcaggctcctgaatagctgggattacaggtgtgtgccaccacgcctggctaattttgtatttttagtagagatggggtttcaccatgttggccaggctggtctcgaactcctgacctcaggtgatccacccaccttggcctccgaaagtgctgagattacaggcgtgagctaccgtgcccggccacaggtagccctttttatcggtgcagctgctggcatcccctgctgcaagcttccagcttccttatttgtgtttgcagcccaatcttccaggctgttctttgttagaaaataagtgatttcttgggctgctttttgttagaagggaagttctaccgaggattttttgtttccaaaaaaaaaaaaaataggcaacgtagagtagctactcacctgcataataagagattgggttgggggctgccagagatttgcgccctatgcggatggcacatctggtcctcaccggtttttcacggtctatttagatcagatacagcctccctgctagcttgtctgtaaaaatccttgccttttttttttttctgaggcggagtctcactcttgtccccaggctggagtacaatagagcgatcttggcttactgcaacctctgcctctcgggttcaagagattctcctgcctcagcctcccaagtagctgggattacaggcacatgccaccaggtctggcaaaattttcttgtatttttgtagagatgaggtattactacattggctaggctggtctcgaacttctgacctgaagtgatctgcccacctcggccccccaaagtgctgggattacaggcatgagccaccgcgcccagccatgtgcccattttttttttttttttgagatggagtctcgctctgtcgcccaggctggagtgcagtggcgcgatctcggcccactgcaagctccgcctcccgggtttacgccattctcctgcctcagcctcccgagtagctgggattacaggagtgtgccaccacgcccggctaattttttgtattttttagtagagacggggtttcaccatgttagccaggatggtctcgatctcctgacctcgtgatccacctgctttggcctcccaaagtgctgggattacaggcttgagccaccccgcctggccgtgcccattcttaagccagtcatattggctgaggaggggctgggctgattggccaggttctctcctagagatggtgtgggctgtaccacacctaaggcagtggcccaagtctgagaatggagggagaggaccctcccccttagggacctgctgttggtcagcagccagtgatcttgggtgcactgcatttcctctctgggcctcagtgccttcatctccaagctcagctcagagcatggcggtggtgtctgctgatcatattggtttagtcatcagctatttagtcagtaccttctcaggggcacagctgggggcacaggggatgcctctcagtgacgtttgagctgagactgaagagttcaggcaaatgcatctgggggaagactgcttcaggcaaaaggctagcatgtgcaaagtccctgaggaggcagagtgttcagcggagatggagggagaggaggcagcaggggcggcagggccagatccagttggccacaggaagaaatgtgggtttcatcctgtgtgtgagcgggaagccccgagcacatttgcagctgttatgatccatctggtgggtaatccctggcatgcaactgttttattcccactctggggccgggatgcctgggttcaaatcaaattctgccacttcccagctctgtgatctcgttccagttccttaccatctgtgagcctcggtttctccatctgtaaagtggcggggggggagtcattccgaagcccaactggagatgagaactcttaaaggcaccgtggggcacctggtggatgaccccaggaagctcttgcggggcttgagaatgtgtggcagggagggaagatgtcctgcagggggagcccatgagcaggtggctccgtgggcacctggggctcagtccagacgcagcgcagcctagtgggtgcacctgggagtggtctgcccaggggtgacgctccggccagcccaggctcagccagggggctctgggtgacagtgtaggctccaggctgagggttgccctgcggggtgccagctctcctgctagtcctgccctgtgtgcctgctgaggctcagacagggatgtggtatctccaggaagctgcttggcagaatcgagggaccacgaaggggtgcgggtagggggaggaggaaagacactgcatctgcttggatagaagttgcatccggccaggcacaagtggctcacacctggaatctcacactttgggaggctgaggcaggaggattgcttgaggccaggagttcaagaccagcctgggcaacagagcgagatcccccatctctacaaaaaaatctgtagtcccagctactcgggaggctaaggctggaagatcacttgaacccaggagttagaggctgcagtgagctgtgatcatgccactgcactccagcctgggcggcacagggagacccccaaccaaaaaacaacaaaaaaagctgcatcctagaccctttgcaagagactgaacgagtcctaggagtcaatgtggtccctaatggagtgtggacgattctgcagccatcatcatccttaggctgttccgctcataggattagctccctgggtggggcggtctcggggtctctcctctgatccgggctccccaccgcctgccggtcccatcacccacttcctcaccccgtcccccaggtggttcagtacatcggggagatctgccgctacctgctgaagcagccggtgcgcgaggcggagaggcgacaccgcgtgcgcctggcggtggggaacgggctgcgtcctgccatctgggaggagttcacggagcgcttcggcgtacgccaaatcggggagttctacggcgccaccgagtgcaactgcagcattgccaacatggacggcaaggtgcacaccggcagggccccggggcaggtctcggagttcagggaagaccactgtctcctcttcctggggcccctgggatacataaaacagcctggactggcgcggaaggctccgccaaggcgcacgcagggcggggtgtaaggggagttcctgggactcccggtgcaccaccagagggacaatcctgcagcctgcacagatagtcatgtgactgtggtccttgggtcaggagagttggaggataggtatggctgtgcgccctggcaagtgcctcagcctttctgagcctcagtttctgcgtgtggagattagcaaggagaatagggctctgtgtaccgtgctgttattttgttgttgttgtttgagacagagtctcgctctgtcgcccaggctggagtgcagccacgtgatcatagctcactgtagctttcagttcctgagctcaagcaatcctcctgcctcagcctcccaagtagcagcaaacagataccttcataattagcaactacttactctcttaatcatctccattctccgcttgcatgaatctccctctcctttcccaagcccctcccatccaaggccaagaacagaccgtaataatgatcataaagcaaatgtcggctgggcacagtggctcacacctgtaatcctaacactttgggaggctgaggcaggaggatcacttgagcccaggagtttgagaccagcatagccaatgtagtgagacccccttttctacagaaaataaaaaattagccaggcatggtggcaggtgcctgtagtcaatgctactaaggaggctgaggcgggaggatcacgtgagctcacgagatcgaggctgcagtgagctatgattacaccactggactccagcctgggcaacagagtgagactctgtgtctctaaaaaggaaaaaaaaaaacagcaagtgccatgggggctgggtccttaatgccaagaacaatgctccttcctcagtgtgcttggtgttggatggccagcccccagggcacttttgctcactgtagctcagattcttgcataggaaacacaccaggccaggcacggtggctcacgcctgtagggtccagccccacagggtcggtgggtttttctccctgtgtgcggagacgagagattgtagaaataaagacacaagacaaagagatgaaagaaaagacagctgggcccgggggaccactaccaccaagaggcggagaccggtagaggccccgaatgtctggctgcactgttatttactggatacaaagcaaaaggggcagggtaaagagtgtgagtcatctccaatgataggtaaggtcacgtgggtcatgcgtccactggacagggggcccttccctgcctggcagccgaggcagaggcagagagagggagagagagagaaagacagcttatgccattatttctgcatatcagagacttttagtactttcactaattttgctactgttatctagaaggcagagccaggtgtacaggatggaacatgaaggcggactaggagcatgaccactgaagcacagcatcacagggagacggttaggcctccggataactgtgggcaagcctgactgatgtcaggccctccacaagaggtggaggagtagagtcttctctaaactccccgggggaaagggagactccctttcccggtccactaagtagcaggtgtttttccttgacactaaggctaccgctagactagacttcccagacgctggcgtcaccgctagaccaaggaaccctctggtggccctgtccgggcataacagaaggctcgcactcttgtcttctggtcactactcactgtgtcccctcagctcctatctctctatggcccggttttttctaggttatgattacagagcgaggattattataatactggaataaagagtaattgctacaaactgatgactaatgatattcatatataatcatgtctatgatctagatctagtataactcttgttgttttatatattttattatactggaatggctcgtgccctcggtctcttgcctcggcacctgggtagcttgccacccacacacgcctgtaatcccagcactttgggaggctgaggtgggtggatcacttgaggtcacgagttcgagaccagtctggccaacatggcaaaaccccatctctactaaaaatacaaaaaaaaaaaaaattgtttgggctcagtggcatgcgcctgtaatcccagactcaggaggctgaggcataagaaccacttgaacgtgggaggcagaggttacagtgagcgaagattgcgccactgcattccagcctaggcgacagagtaagactctataaaaaaaggaaggaaggaaggaagggaggaacggaggaagggggaaaagcagaaagaaacacaccagacagggtgtagtggctcaaacatgttggagaagcatttctgttcatagaaccatgccaagcagggcggcgggcagcaggtgaagctctgcagtgtctgacgtagctgtagtgtccacacagaggcatctacttcctgccagcatggagggttttgtggatcaggaagtgggtgccagccagaggtcttctcttgactgaatgcaggctgggaaggtgggaggaggggccctgagttggaggcgacgcttactaccctgcttttgcagatcagccaaggtcacagagcttagaatgacactggaggtgctaggtccaagccccagggcaaggcaggcaaagtgttactgagaaggaccccgcatatccccggctccttccaactcagttcaccccattccaggtcggctcctgtggtttcaacagccgcatcctgccccacgtgtaccccatccggctggtgaaggtcaatgaggacacaatggagctgctgcgggatgcccagggcctctgcatcccctgccaggccggtgagcagggcccccgcatggtccccacccggagcaggggtccccacgccctgcctgcctagcgcagcctgaacatggccttctccctaggggagcctggcctccttgtgggtcagatcaaccaacaggacccgctgcgccgcttcgatggctatgtcagcgagagcgccaccagcaagaagatcgcccacagcgtcttcagcaagggcgacagcgcctacctctcaggtgcgcagcctgctaggccccggtgactggctgtgcggatggggatcctccacccatctgcccctctcccctctgccaggtgacgtgctagtgatggatgagctgggctacatgtacttccgggaccgtagcggggacaccttccgctggcgaggggagaacgtctccaccaccgaggtggagggcgtgctgagccgcctgctgggccagacagacgtggccgtctatggggtggctgttccaggcaagctggggttgcagggggtggtcctgaggcatggtcctgagggagctcagccaaaaggggcttagaagtacacatgcctttgggcagtgcacaacctggacaactgctcatggcagcccaggaggaagcactggatctggagccagttcacctgggtgatgttgagcctcagttttgtcatccagaaaatgggatcatgaaagcccacctgtcttagggcttcaatgagccaagcaggagctccacaaaatgtgtggctgcttccataaatgtcatcccaggttgggagagactggagattacagaccaggggctactgcttgacagtgtatctggtcctgctggtggggaggatgagaggcggggtgtcctcagctgagcctctgcctccaggagtggagggtaaggcagggatggcggccgtcgcagacccccacagcctgctggaccccaacgcgatataccaggagctgcagaaggtgctggcaccctatgcccggcccatcttcctgcgcctcctgccccaggtggacaccacaggtgcgagtctcccccactccaatctctctcttcatccatcagtgtgtctgttgattcatgtcttggtccattttgtgttgctctaaaagaatacctggccggggccaggcacggtggctcacgcctgtaatcccagcactttgggaggccgaggcgggcggatcacgaggtgaggagatcgagagcatcccggctaacacagtgaaaccctgtctctactaaaaatacaaaaaattagccgggcacggttgcgggtgcctgtagtcccagctacttgggaggctgaggcaggagaatggcatgaacctgggaggcggagtttgcagtgagcccagatcacgccactgcactccagcctgggcgatagagtgatactctgtctcaaaaaaaaaaaaaaaaaaagaatacctggccgggtgtggtggctcccgcctgtaatctccgcactttgggaggctgaggcaggtggatcacctgaggtcaggagttcgagaccagcctggccaacatggtgaaactgtgtctctactaaaaatacaaaaaaaaattagccaggcatggtggcatgcacttgtagtcccagctactcaggaggctgaggcagaagaattgcttgaacctgggaggcagaggttgcagtgagccgagatcaggccactgcactccagcctgggtgacagagtgagacaatgtctcaaaataataataataatttcaacatgatttttggtgcggacaaacaaaccatatccaaaccatttactcatcctagttcaggacagtgtcctgggactgacacaagggctcacagccagctagcactgtgggctctcacgggtcccttctgctgttttattttagtagttatttatttccattcctcacttccactgccactaagcattctgaaatagtgttttttttgtttttttttttttttttttttttttgagatggagtcttgctctgtcacccaggctggagtgcagtggcgtgatcttggctcactgcaacctctacctcctgggttcaagcgattctcctgcctcagcctcctgaatagctgggattacaggtgtgcaccaccatgcccagctaatttttttgtatttttagtagagatcgagttttaccatattggccaggctggtcttgaactcctgacctcaagtgatccacctgccttggcctcccaaagtgttgggattacacacatgagccactgcacccggcctcggtgtatcttttctttttcttttgttttttttgtttgtttgtttgtttgagacagggtcttactctgttgcccaggctggcatgcagtggcactatcatagctcactgcagcctcagcctcctgggttcaaatgatcctcccacctcagcctctggagtagctaggactacaggcaggcaccaccatgcctgactaatttttttgattttttgtagagatggggtctgtattagtccattctcatgctgctaataaagacatatccgagactgggtaatttataaaggaaagaggtttaatggaactcacagttccacatggctgggatggcctcaccatcatggcagaagacgaaggaaaagcaaagggactttttaatggtggagggcaagagagtgtgtgcaagggaactcccctttaaaaaccaccaaataaagccatcaaatctcgtgagaccccttcactatcatgagaacagcacgggaaagacccacccccatgattcaactacctcccaccgggtccctcccacaacacgtgggaagtatgggagctacaattcaagatgagatttgggtggggacacagccaaaatatatcagggtctcactgtgttgcccaggctggtctcgcagtcctgggctcaggcaaactttttcttaaaggaccagatagttaatattttcggctttgcaggccatacagcctcgattgctattcaacactgctattcttgtgcaaaagcagccatagacaatgtgcaaatgaatgagcatggctgtgtgccaataaaactttatttctaaatttttatttattttttgagacaagatcttgctgttgtccaggctggaatgcaataatgcaatcatagtttactgcagtcttctcctcctgggctcaagtgattctcccacctcagcctcccaagtagccggaactacacgcacgtgccatgacacccagctaatttaaaaaaaaaaaaaaattgttggccgggtgcggtggctcacgcctgtaatcccagcattttgagaggccgaggcgggcagatcacttgaggtcaggagttcgagaccagcctggccaacatagtgaaaccctgtctctaccaaaattttaaaaattagccacgtgtggtggtgcacgcctataatcccagctacttgggaggctgaggcaggagaatcacttgaatccaggaggtggaggttgcagtgagccgagatcacaccactgcactccagcctgggtgacaaagcaagactatgtctcaaaaaaaaaaaaaaaaaaaaaaaaaagggtttttgcagagacagagtctcactatgttgcccaggctggtcttaaactcctgggctcaagcgaccctcctgccttggcgtcccaaagtactgagattataggcatgagccattattgtgcccggccccagtaaaactttatttacaaaaacaggtggagggccaaatttggcccacaggatgtaagttgctaaactcttattcactgtgtaacagacacagccctgcctgtcatgtggggaatggacacatgaccaggcagggtgtacattttcttgccctggtgaggagtggttagggaggcctcactggaggagggggcatgaagccaggatctgacagacaagggggaatcaggcaggcaaaatggggaagaacattcctgcccaggggacagcctgtgggaaggtccagaggtgcaggagaggatattgagttgaggcctcccagaagccacctgctcagcccttatctgccccccatccccactataggcaccttcaagatccagaagacgaggctgcagcgagagggctttgacccacgccagacctcagaccggctcttcttcctggacctgaagcagggccactacctgcccttaaatgaggcagtctacactcgcatctgctcgggcgccttcgccctctgaagctgttcctctactggccacaaactctgggcctggtgggagaggccagcttgagccagacagcgctgcccaggggtggccgcctagtacacacccacctggccgagctgtacctggcacggcccatcctggactgagaaactggaacctcagaggaacccgtgcctctctgctgccttggtgcccctgtgtctgcctcctctccctgcttttcagcctctgtctccttccatccctgtccctgtctggccttaactcttccctctttttcttttctttctttctttcttttttttttaagatagagtctcactctgctgcccgggctagagtgcagtggtgggatctcggctcactgcaacctctgcctcctggggttcaagtgatcctcccacctcagcctcctgagtagctgggattacaggcacccgccaccacgtccagctaatttttatatttttagtagagacggggtttcaccatgttggtcaggttggtcttgaactcctgacctcaggtgatccgctggcctcggcctcccagagtgctgggattataggcgtgagcctctggcccggcctttcctttttcctctcctctcctgccgagagtggaacacgcgtgtcctgggagctgcatcttgtgtagggtccagctgcttttggggactgcaggaatcatctcccctgggccctggactcggactggggcctccccacctccctctcggctgtgccttacggagccccgatccaggcctcctgtggctgttgggttccagatgctgcagctccatgtgacttccaagcaggccctccgccctccctgctgaatggaggagccgggggtcccccaggccaactggaaaatctcccaggctaggccaattgccttttgcacttccccgttcctgtcacatttccccagccccaccttcccctcctgatgccctgaaagcttccggaattgactgtgaccacttggatgtcaccactgtcagcccctgccttgatgtccccatttagccatctccatggagctcctgctggagggccctgaaccctgcactgcgtggctgcccagccagctgcctcctgtcctgggaggaggcctcctgggtgtcctcatctggtgtgtctactggagggtcccacaggagaggcagcagaggggtcaggggaggtctcctgccgggggttggcctctcaagcctcaggggttctagcctgttgaatataccccacctggtggtggcccctccgatgtccccactgatggctctgacaccgtgttggtggcgatgtcccagacaatcccaccaggacggcccagacatccctactggcttcgctggtggctcatctcgaacatccacgccagcctttctggggccggccacccaggccgcctgtccgtctgtcctccctccagcagcaccccctggcccctggagtggtggggccatggcaagagacaccgtggcgtctcatgtgaactttcctgggcactgtggttttatttcctaattgatttaagaaataaacctgaagaccgtctggtgcctgctgggagcccattcattgagtgtccctatgtggcacagaacccttgctgagtttcagaaggcaggactcggccagccgggcatagtggctcatgcctgtaatcccagcactttgggaggctgaggtgggtgaatcacttgagcccaggagttcgagaccagcctggccaacatggtgaaaccctgtctctactaaaaatacaaacaaaataattagctgggcatggtggctcacacctttaattccagctactcgggaggctcaggcaggagaattgctggaacctaggaggcagaggttgcagtgcactccagcctgggtggcagagcgagactctggttcaaaatagaaagaaagagagaaagggggagggagggagggaaagagcgagagaggagaggagagggagggagggagggaatacaaaaagtagccaggcatggtggtgcgcgcacctgtaatcccagctaccccagaggctggggcaggagaattgcttgcgccgggaggtggaggttgcagtgagccgagatggtgccactgcactccatcctgggtgacagagcgagactttgtctcaaaaaaaaaaaaaaaagaaaagaaaaagaagggaccctgtaccatgtggccccatctgcaagaccaaagggaccttggggcaggggcactcgggttggccctctcgctggcctgccgagggggaggcacctccctgcagtgtctgggcctcacaggccctcgttgaccttgtggttgcaggggagggatggccagcctgcctgtgggttcctgcaggtgttgcaggatggctcagatcacggtatgtcctggcacctgtggctgccctggcagtgtcctcttccatgtacaggccggctggtgtgagagctctgggtgaaagtcgctaggcctgctggggtggccgtctgagctgggattcgaacccaggactccaagctcaggagtctatacagtattcctcccaatcgctgggggatatgttccaagaccccaaatggatgcctgaaactgaccataatactgagccctaaatatgttttgtttcttttctttcttcctttctttcctttccttctttttctttcccttcctccctccctccctcccttcctttccttcatcctttcctccctttctaattttaatttaatttaattatttatttatttttgagatggagtcctgctgtctcccaggctggagtgcagtggcacgatctcggctcactgcaagctctgcctcccaggttcacgccattttcctgcctcagcctcccgagtagctgggactacaggtgcctgccaccacgcccggctaatttttttgtatttttagtagagatggggtttcaccgtgttagccaggatggtctcaatctcctgacctcatgatccgccctcctcggcctcccaaagtgctgggattacaggcgtgagccaccgcacgtggcctaatttatttatttttaagacaaagtcttattctgttgcccaggccagagtacagtggcatgatcatagctcactgcagccttgacctcccacacacaagcaatcctccatcagcctcctgcgtggctgagactacagatatgcaccatcacgcccagctaattttttgatttgtttgcagagatgaggtcccactgtattgcccaggctggtcttgaactcctgggctgaagccatcctcctgccttggcctcccaaagtgctgggattacaggtgtgagtcaccgtgcccagtttatactggtttttcaatctcataaccaggaggctactaagtgacaaatgagtgggcatggggggagtggtgtctccagcatggatctgctggacaaaggggtgattcatgaccctgggcgggacagagagggatggagcaaggcagtccgagatttcatcatgctcctcagaacagcacgcaatttgaaacttatgaattgcttatttctggaattctccatttaatatgtttgaactgtggaaacctcagaaagagaaactttgaataagcagggactactgtactctcaactgactctcacctctgctgtccccctcgcgtgtcataatgttggcatcttgtttgttgtctctacctcaggggacaggaggtgacagagcatttgctgggagaggacactgagggggtgaccctcgtgtgcagatgagcaagtgaatttttttgttttgttttttgctttttggtttttttgagacggagtcttgctctgtcgcccaggctggagtgcagtggcacaatctgactcactgcagcctccgcctcctgggttcaagcaattctcctgcctcagcctcctcagtagctgggattgcaggcacgtgccaccacacacagctcatttttgtatttttagtagagacagggtttcaccatgttggccaggctggtctcaaactcccgacctcaggtgatccacccaccttggcctctcaaagtgctggaattacaggcgtgagccatggcacccagctgggcaagtgaattctgactaatctctctccaacctcgcaaccacttcaggaagtgtcaccatggtccccattgtacagatgcagaaactgaggcacaagaaggggaatggactcattgccaggggctccaggtgagacagtggcccagtgaactttcttgttccaaagcctctagctgcaatagtgtctaggaagttccctccaagttggccagaaaataatcccaatgactcttaggcttgaactctgttagtttttcttattaattaacagactttttgggttttatttatttatttatttatttatttatttatttattgttttgagacagagtctagctctgttgcccaggctggagtgcagtggcgagatcacggctcactgcaagctccttctcccaggttcacaccattctcctgcctcagcgtcccaagtagctgggaccacaggcgcctgcaaccacacctggctaatttgtatttttactagagacagggtttcatcgtgttagccaggatggtcgtgatctcctgacctcgtgatccacccgcctcggcctctcaaagtgctgggattacaggcgtgaggcaccgcgcccggcctatttatttatttaagagggagtcttgctctgtcgcccaggctggagtgcggtggcgcgatcttggctcactgcaacctctgcctcccgggttcaagccattctcctgcctcagactcccgaatagctgggattacaggcatgagctactacgcctggctaatttttgtatttttagtagagatggggtttctacttcatttgagaggccggtctcgaactcctcacctcaggtgatctgcctaccttggcctgccaaagtgttgggattacaggcgtgaagcaccacgcctggcctattcctttttttttttttttttttttgagacagagttttgctcgttgcccaggctggagtgcaatggcgtgatctcagctcaccacaacctccacctccggggttcaagccattctcctgcctccgactcccgagtagctgagattacaggcatgtgccaccacgcccagctaaggctttgtatttttagtagagacagggtttctccatgttggtcaggctgatcttaaactcccgacctcaggtgatccacctgccttggcctctcaaagtgctggaattacaggcgtgagccaccacgcccagccctcctttctttttgaatagtcctggcaccgttgccaaagatgagttgaccatatatgcataggtttatttctgcatcagttccaatcatttatttatatgtctatccttatgccaataccacagttttggttattgtacctttttattgtttgaaatgagaaagtatgagtcctcgtattttattcaatattgttttggctattttggggccatttgcaatttattattaattttaggatcaatttgtcaatttcaacaaaaacattgtaaatttgaaagggattacattgcatccgtagaccaatttgtggagtactgccatcttaacaatattatactttccaatccatgaacgtggaatgtcttaccatttatttagatcatctttaattttttttttcaccaaagttttagttcttttgcttgtttcgagacagggtctcactctattgcccaggctggagtggaatggcaggaacacagctcactgcagccttagtctcctgggctcaagtgatcctcccaccacagcctcccaagtagctgggaccacaggcagctgccaccgggtccagccttggcttcccaacgtgctgggattacagctgtgagccaccaagcccagctacagctctcaagaagtacagtcttgtacttcttttattaaatttatgcctactttatactttatgatgctatggtaaatggaattgttttcttaatttgctactgattttaaaatccactacctgtgtgagttgaactgcgcttacacacatcactgaaatatcccactctcagaagtggcccagcctccccaggcccaccaggccttcttccccttccagccctctgtccaggcaagaactcgattggaggcctttctgggcactcagagggacacaccaccacactaggagggttagcttaaaaaattcaacaagcatggccaggcgcagtggctttcgcctgaatgctaccactttgggaggccgaggcaggaagatcgcttgagcccaggggttcaagatcagcctagaccatatagcaagagcccgtccgtccggaaaatgtaaaaaaaaaaaaaaaaaaaattcaacaagcatattttcatcccctacttttttttgagatggagcctcgctctgtcgcccaagctggggtgcagtggcacgatctcggctcactgcaacctccgccaccccggttcaagcgattctcctgcctcagcctcccgagtagctgggactacaggcgcccgccactacgcccggttaattttttgtgttttcagtagagacggggtttcaccgtgttagccaggatggtctcgatctcctgacctcgtgatccgcccgcctcggcctcccaaagtgttgggattacaggcgtcagccaccgcgcccggcggtgcaggaattttaaaactcaccaaaatacgccctccttcagaaaatccctgccacctcgataggacgtcctcttcttgagctcccctctccggccctccctgatacagcaaggttgagcattcgggcactggcttcccgaactcacttcgactcaggcacagcaggcaaagattcaatgggtagggccggaccgactgcccgaccttcgcggtgcttcacttgcctcactgcgcatgtgccaaagacaatcacccaaagtactcgaaaccaagcggcagggccggcccttgcgcaggcgtactagcgacggccgtagggagcgcttcctcctccccgccgccgccctcgccatggccgcgccggccccgggcctcatctcggtgttctcgagttcccaggagctgggtgcggcgctagcgcagctggtggcccagcgcgcagcatgctgcctggcaggggcccgcgcccgtttcgcgctcggcctgtcgggcgggagcctcgtctcgatgctagcccgcgagctacccgccgccgtcgcccctgccgggccagctagcttagcgcgctggacgctgggcttctgcgacgagcgcctcgtgcccttcgatcacgccgagagcacgtacggcctctaccgggtgagagctacgggggccgccggggatcacgccgagagggccacagccaccgcctacaccccggctacggaggccgccgggggccatgccgaaagggccgcgcccactgtctgcacctcggctacgggggccactgggtatcatgccaagagggccgtgcccactgcctgcacctcggctacgtgggtcgctgggggtcatgccaagagggccgcgcccaccggttgccctcggctacgggggccactgggggtcatgccgagatggtcacgcccactgcctgcacctcgactacgggggccgctgggggtctagccgacagggctcgcccgcctcctgaaccccgcctacagtgggtcccgcaggacctcactgcgccctctgcctttatctaggcagggctagaaatggtctacttgcagtccgtcttcctgcttcatccggtggccaggcagagggaacggcacgggcaagggcctggaagggaatccgagtggcccatgtcaaacgatgcccataactcagccccgtagcggacgggggcacgaggaatcaggtgtagagcctgaatctcagggtcctgatctctaaccccagcgagttctcggggatccctgggcagctttgccgctctgatggctctgcttccaggctgttcatctttggctttgagcctcaggattctatagaatcagaggagcgcgctcttttaaagacagggtaactgaggcttggaggagccttggcctggccgagggaagagtgggaggggcgggctcaaaggccaggaacctcaagtcacttgagtctggcagcgtcaagggacaccccatgctgggtgtgccgtcttctctttgcatagaatcttgagctgatgatggttttgtgggttttttattaagagaaaaggcttactgaacgctttatatgcatcaattcatgagtccgtaccacagcctatgagatgttacactcatttcacagatggagaaactgaggccagaagaggtgagcttacctgcccaaggcatctagtgaccagaggggcagccagggtgtgatcctgcctcatctgacttcgtagttgggtacacatttaacttccgccttcctgtgtgtgttttccaagagcatcattaaaaagttttggccgggtgcggtggctcacgcgtgtaatcccagcactttgggaggccgacgtgagtagatcacctgaggtcaggatttcgagaccagcctggccaacatggcaaaactctgtctctactaaaaaaaaatacaaaaattggctgggtgcggtggctcacgcttgtaatcccagcactttgggaggctgaggcgggcggatcacgaggtcaggagtttgagaccaacctgaccaacatggtgaaacctgtctctactaaaaatgcaaaaattagccaggtgtggtggtgcgcacctgtaatcccagctactcgggaggctgaggcaggagtgaggcatgatcagtgaaccgagatcatgccattacactccaccctgggcgacagagtgagactgtcttaaagataaaaaaaaaaaaaagcaggtttttggccgggcgtggtggctcatacctgtaatctcagcactttgggaggccaaggatggtggatcacctgaggtcaggtgttggagaccagcctagccaacatggcaagaccccatctctactaaaaatacaaaaattagctgggtgtggtggcgtgtgcctgtaatcccggctacaggggaggctgaagcacgagaatcgcttgaatgtgggaggcagaggttgcagtgagctgagatcatgccactgcactccagcctgggcgacagttgagactctgtctcaaaataaataattgtgaaatgctgcagagtgctagggaatagggagtgagcattcgtcaagggctatggggtgggaggtcctgagaaggtgccatttgagctgagagctggagcatgtgcaggagctggccatggtcaagctgtggcaagagggctcagctaaggccaaagccgtgtgatgggagcaaacctgaagccaggacttgctccttctgccggttctctgtgaggggaatcatatcggttccctagggctacataacgaatgaccacaaactgagcggcttaaagccacaggaatttattctctcaccgttctggaggccagaagtctgaaatcaaggtgttggtggggtcacgccccatctgaaagctctttgggaggatccttcattttctcctcatcttctgggggctctgggcgttccttggcttggggtcacaccattccaattcctgtctctgtctgcacatggccttcttggattctgtgtgtcttctcatcttatataaggacgccagtcattggatttagggcccacactaatccactatgacttgttcttaactaattacatctgcaaagaccctatttccttccttccttccctccttccctcccttccttcccttccttccttcctcccttcctatactttcttttcttttcctttccttttctttctttttttgagataggatcttgttgtgttgcccaggctggagtgcagaggcatgatcgtggcttactgcagccttcagctcccgggctctatcaatccccctgcctcagcctcctcagtagctgggactacaggtgtgcaccaccaggcccagctaatttttttttttgagttggagtttcacccttgttgcccaggctggagtgcaatggcgcgatctcagctcaccacaacctccgcctcctgggttcaagtgattctcctgcctcagcctcccaagtagctgggattacaggcattcaccaccacgcccagctaattttatatttttagtagaggtgggatttctccatgttggtcaggctggtctcgaactcctgacctcaggtgatccgcctgccttggcctcccaaagtgctgggattacaggcatgagccaccgtgccaggccgctaattttttatttttggtaaatacgaagtttcactatgctgcccaggctggtctcaaactcctgggctcaaccgattgtcccacctcagcctcccaaagtgctgggattacagccgtgagccaccatgcctggccattttctgttgtttataagcctcgagtttatggtgttttgtgatagcaggctgcatagattaacacagggaccttggacaaagcagagtggtctttccaactatggatacgattgtgtccctccccagctcacacaccctccttggctccccaatgccctcagtgtggagctcatactcctcaggtcagcattcagggcagtcagcccctgcgtttacttcgtggctcaccttagcattgcctcagctcactgagctagactctgcacaaacacgaggcaccgagacatggacgccatctcagagcagaccagggcccctggggcgcctctcagtgggatagggctgcagctttctccttgatccaagtgcttttgagttaaatctgctgccaacgactccaccattcacaggccagggcatctactgtgcgctagccacaggtgctgggcctgggcaagcctggcccccactccctgtagtggggcaggtgcaggcgggggtggctgctcggaggaggtggcctgagggatgtatatgagtttcccaggcagccttaggagggagggtggggatggagaaggttacccttctccatggagggtggtgaggggctgagttttatcccaagggccgtgggaccctggaggctttgaaacaggacaatgggctggctagacaggtgcaggctatggccaggaaaccccccaaatacaacggaattgaaagactcctgttggaatgctggcccccgcaggaaccaccatgatcccgattcacccaggagggccaccctcccgtccagccccccaagagcagcagggctccctcttgcccttgaacctcctctgccctgacaggcggcgtcacccagggctcaggatcctggcttccagcattccagaggtgactcaccaaccaaagtgtcactcaccaaccgaaggaccttgcacaaatgcaccagcctccccatgcctcagtctccccatctgtaaatgagtgttatgacggtactgtcataaactccctggaggatccaggtggtcacgttactgttggtgacattgtccctctgttggctgcagacgcatcttctctccagactgccgatcccagaaagccaggtgatcaccattaaccccgagctgcctgtggaggaggcggctgaggactacgccaagaagctgagacaggtgagccccgaggagcggccgcaagggagtcacatccacgaagcggccacaccccgggcaacagagcggccttctgattgtcaccagcaggaactgccccagggatcactggcagatccctttgaggaatcccctcttcgaggccacagccctgccctggggagcctgaaggccactcggcctctgttgcccaggtaacaggcctgggtcctcacatcttggggaaatatgatgggtatggctatggctttgatcacaggctacattgagcactgtttcctgcgttacagctacttgtatttctttttttttttttttctttgagacggagtctcactctgtcgcccaggctggagtgcagtggcgtgatcatggctcactgcaagctccgcctcccgggttcacaccattctcctgcctcagcctcctgagtagctgggactacgggtgcccgccaccacgcctggttaatttttttgtatttttttagtagagacggggtttcaccatgttagccaggatggtctcgatctcctgacctcgtgatccgcccaccttggcctccaaagtgctgggattataggcgtgagccaccatgggccttttttttttttgagatggagtcttactctgtcactctgtcacctaggctggagtgcagtgatgcaatctcagctcactgcaacctctgcctcccgggctcaagtgattatcctacctcagcctcccaagtagctaggactacaggtgcctgccaccacgcctggctaatttttgtatttttagtagagacagggtttcatcatgttggccaggctggtcttgaactcctgacctcgtgatccacctacctcggcctcccaaagtgctgggatttcaggtgtgagccaccatgcccagccacagctacttgtatttttttatctgacaactgtttctgtgtcctctgagtctcccctgcccctgccacctacaacctctcaaggctgtcttctccccacgcccaggcattccaaggggactccatcccggttttcgacctgctgatcctgggggtgggccccgatggtcacacctgctcactcttcccagaccaccccctcctacaggtgagcacaccaatgcggggttccaccctagtcctgagcccagtccctaacatctgggacttccagagggagagccacctgccgggtggggtgtctagagccagggttcaagtcagcctccaccaacatacctgcctgctgggctcaatcctttcaggtctcagttgagccccttaaaacagggaccttaaactacccaccatgggattgttagtaggatgggatggaacagtggctggaccaggcctggtgtgtgtaagtgtccaagaagctgaagtgacattgtccttctgcctccatccctgggcttcctccccaaggagcgggagaagattgtggctcccatcagtgactccccgaagccaccgccacagcgtgtgaccctcacactacctgtcctgaatgcagcacgaactgtcatctttgtggcaactggagaaggcaaggcagctgttctgaaggtaacagctgagggttctagtcctgggaagttcatgggcatgtgggccccagggacagaaaatggccccagacattattgtgctgaagcatcagatctgaagaaaactcagtcattcttgggttgaaaggtaacttgaaattgcaattagaaaaaaaggaaaaaaaaaaaaaaaaccccagaaaattgcaattaaaggctagttaggtattaaccgctatgaaatgaaattgatgagatgaggccaaagctgcattcagaggtaaattaatagcattcaaatgcatttaaaaaaaattattaagtagcaaactattgaaataaatcaagtgctttcctgtagaattagaaaaaggacaataatataaatctacaaaagtcagtggcaggactaagtgaaattaaagtcagaaattaatgagttggttaatatattttaaactttaatggtaagtagatctaaaagatagaaaagctcctgacaaggctaatcaagagaaaaaaaaatcacgtggtattatgaataaaaaaaggtactgttatgtaaagtattttaggaaaatacaaattcattacagcattaaaaataaactaaataattaaaaaggttttagttgccttcattgaaaagaccaacaactacagaagaaactggaaatatatttttattttttttttgttttttgtgttattgttgttgagacagagtctccctctgtcgccaaggctggagtgcactgatgtgacctcagctcgctacaatctctacctcccaggttcaagcggttctcctgcctcagcctcttgactagctgggattataggcgcctgccaccaggcctggctaatttttgtatttttagtagagagggggtttcaccatgttggccaggctggtctcaaactgctgacctcatgtgatccacctgccttggcctcccaaagtgctgggattacagatatgagtcaccgtgcctagcctggtttttacttttctaagtggttggaaaaaagtcaaatgaagagccaggccatgcttatcatcccatctactcaggaggctaaggcaggaggattactcgagctcaggagttcgaagctatagtgaaatgtaattgcaactgtgaattaccactgcactggggaacatcacgagaactcatctccaaaaaaaataaatcaggcggggcgcggtggcttatgcctgtaatcccagcactttgggaggctgaggcaggcggatcacctgaggtcaggagttcaagaccagcctggccaacatggcgaaaccctgtctctactaaaaatacaaaaattagccaggcgtggtggcgtgcgcctgtagtcccagctactcaggagcctgaggcaggagaatcacttgaacccgggaggcggaggttgctgtgggccgagatcatgccattgcactccagcctgggcgacaagaacgaaactcagtctcaaaaaaaaaaaaaaatcaaatgaataatactccttgaccttgtgaagattctatgaagttcagattacagtgtccagaaattgttttgtttgtttgtttttttgagacagcttctcaccctgtcatccaagctggagtgcagtggcgccatctcagctcactgcaacctccacctcccgggttcaagtgcttctcctgcctcagcctcccaagtagctgggattacaggcacctgccaccacgcccagctaatttttgtatttttagtagagacagggtttcacaacattggccaggctggtctcaaactcccaacctcaagtgatccgcccccctcggcctcccaaagtgctgggattacaggcatgaaccaccgcacccggcccagaaaagttttattggaacatagcaacacccgcttatgtatatattgtctgcagctgttctggggccagaactgcagagctgagtggttgcaatagagactggatggtctgcagagcttaatctattgactctggtcttttgctgaaaaagggtgccaaccgcagtattaaacagttacagaccaggcacagtggctcatgcctgcactttgggaggctgaggcaggaggattgcttgagtctaggagtttgagactagtcttggcaacatagcaagaccctgtctctacaaaaaataaaaaattagctgggcacagtgccatgtgcctgtggtcccagatacttggcagactgaggcaagaggatcacttgagcctcagagattgaggctgcagtgagccttgatgccgtcactgtactccagcctggatgacagcgcaagaccttgtctcaaaaaaaatgcaaatagttacagtgggcggggcatggtggctcaacgtgggagttcaagaccagcctggctaatatggtgaaaccccgtctctactaaaaatataaaaaattaggccaggcgcggtggctaacgcctgtaatcccagcactttgggagacctaggcgggtggatcacctgagttcaggagttctagaccagcctgaccaacatgatgaaaccgtctctaccaaaaacaaaaaaattagccaggtgtggtgggaggcgcctgtaatcccagctacttggggggccgaggcaggagaattgcttgaaaccgggaggcggaagttgcagtgagccaagatcgcaccatcacgccatcacactccagcctgggggataagatcgagagttcatctcaaaaaaaaaaaaaaaaaaaaaaaaaacttagccgagcgtggtggcacttgcctgtaatcccagctactcaggaggctgaggcagaagaatcgcttgaaaccgggaggcggaggttgccgtgagccaagatcgtaccactgcactccagcctgggagacagagtgagactccatctcaaaataaataaataaataaataaaaatagttacagtggatagaaaggaagggactcttgtccctgctgtttggcactaggacagctgagctgggcattgtcacattttgaggatacaagagtcttatttatccttggttggggagccaggagagtgccgaggggcggtgcctgggccgcaggcagggccttactcttctgccctcttcttcagcgcattttggaggaccaggaggaaaacccgctgcccgccgccctggtccagccccacaccgggaaactgtgctggttcttggacgaggcggccgcccgcctcctgaccgtgcccttcgagaagcattccactttgtagctggccagagggacgccgcagctgggaccaggcacgcggcccatggggctgggcccctgctggccgccactctccgggctctcctttcaaaaagccacgtcgtgctgctgctggaagccaacagcctccggccagcagccctacccggggctcaacacacaggctgtggctctggacatccggatattaaaaggagcgttgctggaagtctgcactgtctcgcggtgtttgatggcagcaggcctgggggcgccctggcctgggttctgatccatagccctcatctgtggggaggaaggcggggcctgcttccctggggcatagccaccatggatgaatttcctaagacaacaggctgggcacagtggctcacgcctgtcatcccagcacttcgggaggatgaggtgggcaaatcacttgaggtcaggagttcgagactagcctggccaacatagtgaaatctcttctctactaaaaatacaaaaattagctgggcgcggtggctcacacctgtaatcccagcactttgggaggccgaggctggtggatcacgaggtcgggagttcgagaccatcctggctaacacagtgaaaccccgtctctactaaaaatacaaaaaaaaattagctgggcataggtggtgcacgcctgtagtcccagctacttgggaggctgaggcaggagaatggcataaaacccaggaggcgaagcttgcagtgagctgagatcgcaccactgcactccaacctgggagatacagcgagactccatctcgaaaaaaaaaaaaaatacaaaaattagccgggcgtagtggtgtgcacctgtaatcccagctacttgggaggctgaggcacaacaattgcttgaaccagggaggcggagcttgcagtgagctgagatcgcgccactgcactccaccctgtgtgacagagcgagactcggtctcaagaaaaaaaaaagctgggcacggtggcttacgcctgtaatctcagcactttggaaggctgaggtgggcgggtcacccgaggtcaggagtttgaaaccagcctgatcaatatggcaaaaccctatctctactgaaaatacaaaaattagctgggtgtggtggcatgcgcctgtaatcccagctacttgggaggctgaggcaggagaattgcttgaacccaggaggcggaggttgcagtgagccaagactgcgccactgcactccagcctgggcaacaagagcgaaactccgtcttaaaatgaaacaaaacaaaacaaaaaaacaaatgtattctgtcttagctatagagatcagaagtccaaggtcaaggtggcggcagggctggttccctctggaggctctgaggcagaacccatcccaggcctctcctgtccttggcattccttagcttgtggccatatcactccagtctctccttgtcttcacttggacttctttctcttgtgtgttctcgcctcctatttatttttttgatacagggtctcgctctgtcacccagactggagtgcagtggtgcaatcacagctcactgcagcctccatctcctgggctaaagcgatcctctcacctcagcctcccaagtagctggtgctacagatatgcaccaccacgcctgcctacttgtacaaattttttgcggagacggggtcttggtatgttgcccaggttggtctccaacccctgagatcaagcgatcctccagcctcagcctcccaaagtgttgggattacaggcatgagccactgtgcccagcattcttttcttataaggacacctgtcattggatttaggatcgccttgcacccagggtggtttcatctcaagataccaaatgagtattccaaataagttccaaataaatgcttatttggaataagtattccgaataaggtcacatgctgagtttcctgggtcaggacgtagacatgtcctttgggggacataagtcaaccctctgctgagctccagctgcactgacagggcgaagcactgcattcagccatgctgcggacctgctcagagccttgaaagcaccagagagtctagtctccatgtgctgggctcctgcacattttcccagaatgcatctgctcatggcccacccttcagctttctctaggccccagggacgacagtgtgggaggctggtgggtgcatgggggctgcccagccacgtgcaagtttctgtggggggatccagaggaggcacccggctgagcaggagatgggaattgaaacctgcgcagaggcggctgtgcagggtgagagtggagccgaaaccacagaaagtgaagtttgcttcaacgtcttgtcccggcaggccactcagatgtgagagtgaggaagtgggatggggcctgaccggaaggaggttggtaaacagcaaagagagctgagcggaagctcagctgtggggctggttgagggcaggaggccgtggcccccagagcggcaggcacggggctgcgaagtgaagggaaattgagctgccagcacagggaccccacatggatggttgtgcctggggctgtcaccatctcctactctttgcgagagtgacaactcttcctgctccttttgccttcggagtgaaattcacccttcccacaaggctccacgtggcccctttcacctctccctctccccagcaacatcagcccctcactcagtctccctgcagcgcacccacttcctgctgttcctggagcccgctgagcacattcccaccccagggcctttgcctgtgctgagcccgctgcccggtatctcctttcctgcagctttttgcatggcttgggccctcgctttcttttttggggggacacggtcttgctctgtcgtccaggctggagtgcagtggtgtgatctcagctcactgcaacctctacctcacgggttcacacaattctcctgcctcagcctcccaagtagttggttctacaggcacccaccaccactcccagctaattttggtatttttagtagaaacattgagtttcaccacgctggccaggctggtctcgaactcctgacctcaagcgatccacttgcctcaacctcccaaagtgctgggattacaggcatgaaccactgcgcccaactcctcgcttcctttcatctccgtgacccctccatgcccatcctctatcccctcctgctgcatttttcttccttgcccgtctcatcatctgatggttttcttttttcttttttttgagacagagtctcgccctgttgctcaggctggagtgcagtggtccgatttcagctcactgcaacctccgcctcctgggttcaagtgattctcctgactcagcctcctgagtagctaggattacaggcgcccaccacaacgcccgctattttttgtatttttagtagagacagggtttcaccatgttggccaggctggtctcgaactcctgacctcaggtgacccgcctgcctcggcctcccaaagtgctgggattacaggcttgagccacaacagccagctgaaaaaacataaatttttttaaaagaagaaatgaatcctgggctgttagtgaagattacattcagatattactagaggcttaagcaaaacagaggtttagctctttctctggagagacaccattcagggctggtagagcaatgtcacacattcttcaggaaccccagctccttctacatcattgctttgccctgtcatcagctggattctgcctcatggcccaaggtggctgcttgtgctccagccattgtgtccacgttccagctctagcatgaagaagcttcccaggattcaccgaagacacttctgctcactcctttatggccagcctgggttgcacagccccacatagcagcaaggaagtctggaagatgagtctccattggacagccatgggctccgttatgatcagggattctactactgaggccaataggagcaatggacattgagggacacgtgttctctattcatcgatgacctgcccgcctgcctcaggggctccctggggatcttgccatctgaggggccacactctggactttccttcctccagcctggagcccctgactgctgggaagtgttcagtgtccttgagaggtcttcagggacccaccccactccccagccaacgctggatccagagctcagtgcttgacactcccctcatcagaaaacctgtgatggctccatttgatcacatttccgcttggagtgtagactgcatgccctccctccctccgtccctcccttcattcattcattcattcattcattcattcatgcacacgtttattcatgcattcattcagcaaacatcgagggctgctctgtgccaggcacaaaacaggtgaaggggtggagacgcccaactaaccaaaccaggtcaaatgctgggacataaaggtcgcgcccaaccagtccaggggcacagggacggctctccaaggggctggtatctggtcttttcacctgaggggtgaagcttgggcgaccacgtgcaggaggcgggagcaagagttctctaggcactggacaagaccgcgggggtcagagggacatgggggcttcgggagctgcagggggctgagtggagccagagggctcttggagcgatgaggctgggccctcagtggtgctttcccaaagggcaatgggagagcttcgggaggtcagcacggagagttttggggtgctaaagatggggtttgggcccaagaaaagggacaccttcgctgggtgacgtggctcacacctgtaatcccagcactttgggaggctgaggcgagaggatcacctgaggtcaggagtttgaggccagcctggccaacacagggaaaccccatctctactaaacaaaacaaaacaaaattagccagaaatcgcttgaacccaggaggcgaaggtggcagtgagccaagatcatgccactgcactccagcctgggcaacagagtgagacaccgtttaaaaaaaaaagaacactttaggaggtcaaggagggtggatcacgaggtcaggagtttgagacaagcctggccaacataatgaaaccccgtctctactgaaaatacaaaaaattagccaggtgtggtggcgggcgcctgtaatcccagctactcgggaggctgaggctggagaatcacttgaacccgggaggtggaggttgcagtgagccaagatagtgccattgcactccagtctgggcgacagtgcgagagtctgtcccaaagaaaaaaaaaaggacacctttaagagacacttaaaacgtgaaatatgccaggtgtggtggctcatgcctgtaatcctaacattttgggaggccgaggtgggcggatcacttgagtccagaagtttgagaccagcctgggcaacataggaagaccccccgtgtctacaaaaaatacaaaaattagccaggcatggtggtggcgtgtgcctgtgggcccagctactctggaggctgaagtgagagggtcacttgagcacaggagttccaggctgcagtgagccatgatcgtgccactgcactccagcctgagcaacagagcaagaccctgtctctaaaaaaaaaaaaaggaaaaagaaatggagtccaggtgatggactggtgggagggacagtgttgggggcctgaagaaggaatcaaggatgaagcttcagtgcccccaagtctctctgctcacccctgccaggccacccatcctctaagaccttggcatctgcccccctgccccagcactgacctcagggacagtctgggagtgcctgtccagctctgtctccccagcctggggactcctaggagctgggccagggctgtatcctctctggggtccagcctcaccgggcacagggtaggcacagtgctggtgggggggtgtggcaccaggaactagatgccgcatccctgcccatccccctgttccagcccccatacacaacgactgctggccggtcctgccagatgtctgccctgccaccctcctccaagacgagctatgattttctttctcccacaccccacaacctaaccccggggctgtccccgcagcctctacagaaaccactggctctgggcaacacgggccccaggggagtggggaggacgcaggtgcagcgtggggtggggcaggggcggggcctctgaacccactgtgaccaagcctctcacccgccatccaggtgcccctgagccgaggaacgcaggcggtggtcgtggggaagggaagaggagccccgggagacgacagcagcatgggtgggcggccttcgagccctctggacaagcagcagcggcagcacctaaggggtgagcagccggggaggggacagggtgggagtccaggtgggtgggggctccagccattgggtccacatgctccatgcagcagatggggttcggttcagacctagggctgtcaaaacacacaggatgccttcttaatgtaaatttcacgcagtgaatctttttttattgttgagacaggatcttgtctgttgcccaagctggagtgccgtggtatgatcgtggctcactgcaaccttggcctcctgggctcaagcaattctcccgccttaacctcccaagtagctgggaccacatgcatgtaccaccatgcccaactaattatttcattggttgtttttttttttaatagagacagggtgtccctatgttggccagtttgcttttgaacttgtgggctcaagcgatcctcccgcctcagcccgaatagctgggaccacaggcgtgcaccaccacacctggctaattttttatttgttttcgtagcgacagggtctcactatgttgcccaggctggtcttgaactcctgagctcaagcgatcctcccacatcaacctcccaaagtgctgggattacaggcgggagccactgtgtccagcctgcatcttatttttagtataagtgtatcccagattttgcatagtgcacacttatgctgaaaaccaattacccctttatggttttttttttgtttgttttgttttgttttgttttttgagatggagtctccctctgttgcccaggctagagtgcagtggcgcaatcttggctcactgcaacctccgcctccaggattcaagctattctcctgcttcagcctcccgagtagctgggattacaagcatgtgccaccatgcctgactaatttttgtatttttagtagagatggggtttcaccattttggccaggttggtctcgaactcctgatctcaggtgatctgctcacctcagcctcccaaagtgctgggattacaggtgtgagccactgtgcccagaagactgtgtcttctatttttatttggtaaatctagtgacctgatttagggcaggggttcaggtgggaggcatagggccaagtggagggtgtcccagacccagccaggccctgagggatgtcttcctgagcgggcagggaccagcaggcccctcggtaggaccctggggatggaggctcagttcccaatttgagactaagaggggccagtgccagattcagtgccattcgggtccctctgtcctcatatgtggggtgagcaactgtgctgggcgctggggacattgtggggttggtattggccttaccctcacaggctcatggtctaaacaccttccctctggtggctctgctatgtggggcttctgtgcccaaggtgacctcatggcacagaacggctgctggagctccagccattgggtctacattccatgcagcagcatggaagagtgtttttttggtttttgggtcaagtcatgacccaaaattgcatggtgagaatgatgggagagagctcacatgttccttgagggtagggaagagcagaggtggatgactgcccactgaggagacaatgatcaagccagggctggagggatgtgatggtgttggaaggaaggagataccagaagagcattttggacaggagaaacagcatgtgctaaggccagtgatgtatcttgcaaacaaacaattcacgttcacaccctggtcattccctcatttgctgtgtgccctttggtgagtgacttcacctccctgggcttcattctcttatatgtaaaatggggatagcaacaacgcctagctcatggggctgggggggcattgtaaggattcaaagagttactctatgtagcactgggatttttttcccccagatagtggcttaaacaagataaggattttttttttttctcctcaaactgagaggtgtggaagcaggcaggctagtaaaagttagacacctaaagtcctttcatctcatggctctgccatgtgtggattcctgtgcccaaggtagcctcatggcacagaatggctgctggagctccagccattgggtccacattccgggcagcagaatggaactatgttttatttacagtcaagtgtacaagccttagggcaacagctcaaagagctagtcacccatcacccatatgactacttcccagatagatcaggatacagcacacctccatcactcacagaaagttcacttgtgtgctttggagctttaaaagcttttgaaaagctccccaggtaaagcatatggggacacttttgggtgtgatggatccgctcatcttgattgtggtgagggtttcacggatgtgtgattgtgtcaaagctcagcaaaccatatgcttacatgatacgtgagctataagtgaaggtgtggctcaatctgtattcccagcgctttgagaaaccaaggtgggaggattgcttgaggccaggagtttgagaccagcctggataacatagcaagaccttgtctctacaaaaataaaaaaattagctgggcatggtggcacgtgcacatgatcccagctactggagtggggctgaggtgggaggatcacttgagcccaggaggtcaaggctgcagtgagctgagattgcaccactgcactccagcctgggggacagacaccctgtctcaaaaaaaagaaaaaaaagtgcaagacaagtggatcactggagctcaggagttcaagaccagcctgagcaacatggcgaaacctcgtctctactaaaaatagaaaaattagtcagtcgtggtggcagaagcctgtagtctctgtagtcccagctacttgggaggctgagatgggagaatcacctgagcccaggaagtagaggttgcagtgagctgtgatcgtgccagcgcactccagcctgacaacagagtgagactccatcaaaacaaaaaacaaaaaacaaaacaaaacaaaacaaaaaacccgtctctactaaaaaatacaaaaattagcccagcatgatggcgtgcgcctgtagtcccagctactcgagaggctgaggcgggagaattgcttgaacccaggaggcagaggttgcagtgagctgagatcgtgccactgcacttcagcctggcaacggagcaagactccatctcaaaaaaaaaaaaaaaaaaaaaaaaaagaagctccctcacccagccacatggatggaaacaggcatggagggtgaaggatgaatgaaatttggtgacaacttgtctggaagctcaggatgactacaggagcccccaggtggcttccctgtctgttttgccctccccaagcaggtctcctgggcagattcaatttgctgggttcactgtccccttgtccctgcaggtcaggtggacaccctgctgaggaacttcctgccttgctaccgtgggcagctggcagcgtctgtcctgcggcagatctctcgagagctgggccctcaggagccgaccggaagccagttgctacgcagcaaagtgggtgttgtgggggcagaggacgtttgagtgttaggggagggtcctggaggagccctccctaggccatgcttccaacctcagacctttgccattgccataggatgactttaaatatgcattgtttaaataaacattcactgagcagccaagcaaggtggctcccgtctgtaatcccagcactttgggaggccaaggcaggcggatcaccagaggtcaagagttcaagaccagcctcgccaacatggtgaaaccccgaaaccccatctctactaaaaatacaaaaaaaaatttagccagaccctgtagcgcgcacctgtagtcccagctacttgggaggctgaggcaggagaatcgtttgaacctgggaggtggagattgcagtgagcccagattgtgccactgcattccagcctaggcaacagagctagactctgtcaaacacacacacacacacacacacacacacacacacacacacacacacaaccattcactgagcatgtaattcatgccacatcatgggctgggcatgaggacacacagcccttgtccagtgacaaggacagatcctgcggtaacctctggggttcacaacctgatgggaggtagaagactccaaacaagttagcatatcatgatgtggaatggagtaacattttcttttagatggagttttgctctcttgcccaggctgtagttcagtggcgcaatcttagctcactgccacctccacctcccaggttcaagcgattctcgtgcctcagcctcccgagtagctgggaccacaggcgcccgccaccatgcctgggtaatttttgtatttttggtagagacggggtttcaccatgttggccaggctgatctcgaactcctgacctcaagtgatctccccaccttggcctcccaaagtgctgggattacaagcgtgagcgcctggcctccagacatctctggagccatgaggttgtgtgccccacacacctcactcagtcttcacccctttggtagacaggtctttgactgatgaggaaactgaggcacagagaggccaaatggccttctcgaggtcacactacagaggtgtgatttcaacctgggatccacgcttattactaatgcttggtcccacgctccagttggggctgagattttttgcctctccggaatgccccacttcccagctgtgcccacccagggcggggggctccaggagctgtggacacagagccccttcctgcctaggactctctctgtccagcctggggcatcacgggaccttagcgtcaccccaggatacagcgggtgtctgggtggtcgggccacagggacatcagcccacagccccctgacacccactgctccctctttctgcagaagctgccccgagtccgtgagcaccgaggacccctgacccagcttcggggccacccaccccggtggcagccgatcttctgtgttctgcgtggggacggccgcctagagtggttcagccacaaggaggtgcgtgattggcacgtggcctttctacttctgggtccctccttcccacccccgtcagcctcaaggtttgtgggatccatatctcagcatagccccacctctatcaatcacccaggatgaatcttgtgcccctatgtgtttggcctgttgtaggcaaccatctcgtcccatcccctgctgtgctgggtgggtaaactgaggcccaggccagggatagggtcgtggtcagtatcagagctgtggtttcaacctcttggggcctttgcaagtcacacctctggccgctctgctttctggctggggagcttggagcgatcactacctttctgaaactcagtttccacttctgtgaaatgggatgtttcacaccatgtagggctttgagggttcaacaagagggtcctcagacagcacttgggaccggaccggcacgtggggagcccgtgggtgctgggagctcagggactgagggaggaagggagggaaaggggaaagggaaggagggagagagagggcaagaacaggagggaggaagggagaaagttatgggggcagaggtaggatggatggagggagagaggaggaaaaaaaaagggagggagagccgggcctcgtggctcacgcctataatcccagccctttgggaggctgaggcaaatagatcccttcagcccaggagttcaagaacagcctggccaacatggtgaaactccgtctctactaaaaatacaaaacctagggccaggcacggtggctcaggcctgtaatgccaacactttgggagaccaaggcaagtggatcacctgaggtcaggagttcaagaccagcctgggcaacatggcgaaaccccgtctcaattaaaaatacaaaaattagcctgctgtggtggcgggtgcctgtaatcccagctactcgggaggctgaggtggaagaatcacttgaacttgggaggtggaggttgcggtgagctgagatcgcgccatcgcactccagcctgggtgacagagtgagactctgtctcaaaaacaaaaaaaaaaaaaaagagagagggaggaatggaggaaaggagagggagggaggggtgggaggggcagaggatttttcagctcatctgaaatcttcccttgatggtatagttgggacacagaagccacagttcagacctgtcccaggttggttctctgggtaccttttgtaggaatatgaaaacgggggccactgccttggctcaacagccctgacaggatacacgctcctgacttcccagcgagaatatctccgccttttggatgctctctgccctgaatccttgggtaagggtcccggggttcccaggaacaggtttctccaccccagcatcattaacatgtggggccagatcattctctgcggtgggggcgtcccgtgtacagcagggcagtaagcagcatccctggcttccacccactccctgcctgcagcagcccccaccctgggtgcgacaaccaccaatgtctccagcattgccaagtgtctcccgggggcagcgttgctacgggtgagcatccctactctggaaaacaaacaaacaaacaaacaaacaaacacccactcttgcaagggtgagggggagagttaggtcatgggaccagaatcagaatagcaaaggataaaaacagtaaaatctgggatgggtgcactgtctcatgcctgtagtcccagctactcgggaggctgaggcgggaggatcgcttaagcctgggaggtggtggcagtgagccgagattgccccactgcactccagcctgggcaatagactgaaaccccatctccaaaaacaacaacaaaaacaattaaaaacaataggctgggcacggtggctcatgcctataatcccaccactttgggaggccgaggtgggcggatcacttgaggtcaggagttcgagactagcctggccaacgtggtgaaacctcgtctctactaaaaatacaaaaattagccggtgtaatgacatgcgcctgtaatccgagcactttgggggaccaaggcaggtggatcacctgaggtcaggaggagacctcatgaggccagcctgaccaatatggtgaaaccctgtctctactaaaaatacaaaaggtaggccgggcgtggtggctcacgcctgtaatcccagcactttgggaggctgaggcgggcagatcatgaagtcaggagatcaagaccatcctggctaacatggtgaaaccccatctctactaaaaatacaaaaaattagccagttgtggtggcgggcacctgtagtcccaactactcaggaggctgaggcaggagaatggcgtgaacccgggaggcagagcttgcagtgagccgagatcgcgccactgcactccagccagggtgacagagcaagactccatctcaaaaaaaaaaaaaaaaagaaaagaaaagaaattagagaaggaacaattccaattccaggcatgtgcctggcaaataactcagcattgggcttgcactatctcataaagtctgcccagcaggcaggcccatcactaactaccccatttcacagataaggacattgaggctgaggattgtcacacagtcaagggcagagctagaattgcaccctctgcttcacctaaaagctatcttgctgtcaaaggacacaaaaatgtagtctgctgagatgttgatgctgctcaaaacatcagaatctgcccaaatacccatctcttgagggttgattaaatatattatggcctggcccttggtaatgaacagtgagctggctgtggcggcatatgcctgtagtcccaggtacttgggaggcagagacaggaggatcccctgaggccaggagttccagaccagcctgggtaacatagtgagacccccatctccacaaacattttaaaaaataaaattacctaggtgtggtggcatgtgccggtagtcccagctactcagaaggcagaggcgggaggatcacttgagcccaggagttaggggctgctgtgaactatgatcacaccattgaactccagcagcctgggcaacagagccaggagctgtctctatttaaataaataaataaataaataaaaacctgggtgcggtggctcatgcctgtaatcccagcactttgggaggccaaggcgggcagatcacctgaggtcccagcctggccaacatggcgaaaccccacctctactaaaaatacaaaaattagccgagcgtggtggcacacgcctataatcccagctactcaggagaccgaggcaggagaattgcttgaacctgggaggcagaggttatagtgagccaagacagcgccactttactccagcatgggagacagagcaagactctgtcaaaaaaaaaaaaaaaaagccaggtggctcacgcctgcagtctcagcactttgagaggccaaagtgggaggatcactcgagcctaggagtttgaggccaccgtgagctatgatcacaccactgtattccagcctgggcagcagaggaagactccatctctgaaataaaaataaattaaaatttaaaaacaataaataaaagaaagcaaaacttagccactgaaagtgtcccagacgtatcaaggagcaaaatgaccagttccaaggcagaaaatcccatcttgtcacagatatgcacctcacacagtttcacgcagattttagaatctggagaaatgtcccctaaactattaacagtcattatcgtctctgggggctgaggctggaagactgagatgatcaggagcttccaccttctggactattgatttccttttcttttcttcttctttttgtttttggacagagtcttgctcttgctctgtctcccaggctcaagtgcagtggcatgatctctgctcactgcaacctccgcctcccaggctcaagtgatcctcctgcctcaacctcctgagtagctgagaccataggcacctgccaccacaccctgtaaattttgtgttttagtagagacggggtttcaccacgttggccaggctggtctcgaactcctgacctcacgtgatccgcctgcctcaggctcccaaagtgctgggattacaggcatgacccacctcgcctggcctggattgttgggttttatcgcagtctgtgtttatcatcctggaaagtggaacaaaacactggagacaggataccctaaatatttcttttcatatacttatgtttttaataaaaaatatcttgtgcaggctggtctggaactcctgggcccaagggatcctcccacttcagcctccaaaggtgctgggattacaggcatgagccaccgcggctggtccccaaataaattaaccaaagctgaattcacttattttgtcttgtcaataattctaggtcatcggtatcactgttaaccccatttgggcaggaaaatcacagctcatagagctgtgtgccctagtcatagagctagaaagtagcttggccaggctgggcacaatggctcacacctgtaatcctagtactttgggaggctgaggcaggcagatcgcttgagctcaggagttcaagaccagcctgggtaacatagtgagaccctgtcccttttgttaaaaaaagaaagaaaatgaaagtggtttggtcaggttggaacccgggtctgactgactccaaaaccccacataaagccggacgactcagataacatcccagcttgaatggattggtggtggctgccaggaggactgtattaaggatgctaaggctggaaaacagttctgggatggattggtgatgtctgccttgggcatgcagtggaagaaggtgaccctgcctcccccaaaactgtgccccacccagtgctgttggaataaggatggtggcaagtatcgtggtatgactcatatttatcgagcaactgcccatgccagggactgctgtatgcatttcaggggtattttctcctagtgaatgaacgtctagaagatgcgacctcctgtttgttttcaggagaccatactcaggaagagcctgactccctcttggaagtgcctgtgagcttcccgctgttcctgcagcaccccttccgccggcacctctgcttctctgcagccaccagggaggcacagcatgcctggaggctggccctgcagggtggcatccggcttcagggcataggtgggtctcaggacgggtcagacatttgtggggctaatggtctggggtcagatggctcagcctctgttggctcgggacctctccaggcctcactttctttacccagaaaatgggtttttaggccaggtgtggtggttcatgcctgtaattctagcattttgggaggccgaggcaggcagatcacccaatgtcaggagttcgagaccagcctggacaacatggcgaaatcctgtctctactaaaaatacaaaaattagctgggcatggtggaaggcacctgtaatcccagccactcgggaggctgaggcaggagaatcacttgaacccgggaggtggaggttgcagtgagccaagatcgcggcactgcactccagcctgggcaacaagagcaaaactccatcacacacacacacacacacgagaagaaaatgggttgttgggggagccagaagggacaccaggcagttgtgagtgactagggctgtaacagagacacacagggtgctatgggagctcagcctgagggatgggggttagagcaggcttcccagatgaggggaagctggggtctgtaaaagatgaaggactagccgctgggcgcggtggctcacacctgtaatcccagcactttgggaggccgaggcgggaggatcacgaggtcaggagattgagaccatcctcgctaacacggtgaaaccccatctctactaaaaatacaaaaaattagccgagcgtggtggcaggcgcctgtagtcccagctactcgggaggctgaggcaggagaatggcatgaacccaggaggtggagcttgcagtaagccgagatggtgccactgcactccagcctgggcaacagagtgagactctgtcttaaaaaaaaaaaaaaaaaaagatgaggggccagccagatgaagaaggggaataggtcaggcacagtggcgtggtggcatgagcttgtggtctcagctactcaggaggcttaggtgggaggatcacttgagcccaggacttggaggctgcagtaagcaatgatcatgctaccgcacttcagcctgagcaacagagagaccccctgagaaagagagagaaaagaaaagaaaagaggagagaagagaacagaagaaagaaaagaaggaaaaagaaaggaaagaaaaagaaaagaaaggagaaagaaagaagaaagaaagcaagaaagaaagaaagagaaagaaagaaagagagggagggagggaaaggaaggaagaaagggaggaagggaaagagagaaagaaaaaagtaggggagcagcaggactgacacacacagttgggcaggttgttgactgcacaaacgatgcaactagaggaacagctagtggctgcagtatgtatggcctgaactgctggtcacggggctgtggctgccagtagagggttccttctaagttgaataaacatgatggtcttgggggactgtgttccctgtggagggcattgcctatgcaaagttccagagatgggtgagacttgggtgttggggacctggccaggcggagggcttcctccccgggccatcgggagccaggcaggggagctaccagcaggcactgaggagcagcccctctcagtcctgcagcgaagccaggcccctgctgcccgggccttcctggacgccgtccgactctaccggcagcaccaaggccactttggcgacgacgacgtgaccctaggctcagacgccgaggttagtgccccgcgaggccgcacccgggacccccaggaccctcccggccgaccgcggcgcccatggccccctctcctgcaggtgctgaccgcggtgctgatgcgggagcaacttcccgcgctgcgagcccagacccttcctggcctgcggggggcaggccgcgcccgcgcctgggcctggaccgaggtatgcacggcgtccggatccgggatagggggcgggatgcgggcgttcgggttcccctcccacgactgtcgcctaaaccctctcccgatctctctgacccccatccccgccccgtgtctcggctttgtcccccctcgaccggtctgggcagcttctagacgccgttcacgcagctgtcctggccggggcctccgccgggctctgcgccttccagcccgaaaaggacgagctgcttgcgtcgctggagaagacgatccgcccggacgtggaccagctgctgcggcagcgggcgcgtgtggcggggcggctgaggagtgaggccctggggcggagcctgggctgggaggggcgaggcgatgctggggaaaaaggggcgtgacctaagcgaagaatgggcttgaagttatgtaaaatgggggcgtggtcagagaggggcggggccaagcataggatgtgcaagggaacgggtggggaaggggcggggccaaagcgaggcggtgggcgtggtcttgtggtcgaggcactgggggcggggcctagagtctgtccggaggaaaccaggtcctaagggggctgcttggatacaaaaagggcggggcctcagcgggggataggcgtggccttgaggctgaggctcgaggagttgaggcccagagccgggccaatgcgggtgggcgggcctgggaagtagaacagcggaggaggggcgggggtaaaggctgatacatgggcagcggtgggccaaggtggcccctacaaagacccaggtgggaatcctgactgggcccgcccctccgaggctcagttttctcatcattacaatgggtagaagagggcgctcagcgtccctgctcgcgtccccctcgcgagggcccctgcacatccccatctgtgaggcaccttgcggaggggactccagaccagtgtcttccactcccagcggatatcaggggaccgctcgagtcgtgcctgcgccgggaggtggacccgcagctgccccgggtcgtgcagaccctgctgcgcaccgtggaagcctcgctcgaggcggtgcggaccctcctggctcaaggcatggaccgactgtcccaccgcctgcgccagagcccctcaggcacgcggctgcgcagggaggtgagctcccgtgggtaggggttcagtgagccagagggtgatgtgttaacttgagtctttcctgtggagaatcttcactgaatttgttctaggctgctttttacttattgtggacccatcaccatgctatggtcagtggagcacagtttttgtttgttttttgtttttgagacaggggtgtcgctctgtcaccctggctgaagtgtagtggcacaatcttaactcactgcagcctcgacctcccgggcttaatcaatcctcttactttagcatcccaagtagctggaaatacaggcgcacgccaccaagcccagctaattttttaatttttttgtagagatgggggtcttgctttgttgcccaggctggtctcaaactcctgggctcaagcgatctgcctgcattggcctcccaaagtgctgggattacaggcttgagccaccgcactggccatggaacacagtttaaaacgtgaggggaaaggagttggatgagaaaagtggcaatttagcaaaatcagtctgaggtcatcccccaaactcctcctcccattcccctgtagggcaacaacccagagaattctgctcaaggcaggtcacctcagtgcatctgatatacaagtagcacctaaaatacatacatacatatatacatacatacatacatacatacatacatacatacatacatagaatagcacctactatgtaccaggcaaccttcaactcattcttaagcctccatttcctaatcaccttctccaggaactgtccctggtcccctctatgtcttgcagtagcctgtgcttctcttatcacagcctgactttcataccactgtgggtgatttctatactctgtctcccctaatttgtaagcagagactgggttagagtattccatttctgcagccccagggcccagcacagacagaacatgagatggtattcacagatctgggccaggaaatgtgctcatttcctctcaattgtgccagcatcgcttgttatagttttttcaggttttatcattttatgtccatgacaccgtgcctcactgctacttattttattttattttattttattttattttattttattttattttattttattttatttttgagacagagtctcattttgccgcccaggctgaagtgcagtggtgcgatcttggctcactgcaacctcctgggttcaagcaattctcatgcctcagcctcccaagtagctgggagtacaggtgtgtgccactacacctagctaatttttgtatttttagttgagacagggtttcaccatgctggccaggctggtatcgaactcctcacctcaagtgatccacccacctcggcctcccaaactgatgggactacaggtgtgagccaccatgcctggcccaccactattgtattatgagtttctttggtgacagctgagacgggatgtattttcatttgtgtttctcctttggtgaattggtaatggggtccctggccctttgcaatcagctgacagcatttttcccccaaaactgcttccgggagcacaggtttactcatttggggagatgccgtgggacttggcgctgatgcagacatgctaccgtgaggccgagcggagccgggggcgcttggggcagctggcagcaccgtttggctttctggggatgcagagcctcgtgtttggggcccaagatcttgcacagcaggtgagggtgagaggaggctgggatgaggccaggctgtgaagacagcctccactgacctcctgctaagtgtgccctggagagaccacgatgatcgagacaactccgcggggctgccagtctcatggggacatgagcccgtgaccaggcagcagccacatgtggtggacagagctggggcagggtgtacagggagcgccaaggatgttcctgatccacctctggggttgacaggactttcaggaggaggggacttccaacatgggagagcaatgggaggaatggcgttgccaccagtcccgagtgaatagtgttgagagtgcttgtctgcatttggggaacgtggagcaatttttcagaaatggggaagataggccggcgacatggacgggcagatcgcgcagtgccttgagcgtggggctaaggggtgagctctttcctgagggcaatggggagccagagcaggtatgtgagcagggggagggcatggctggatttaaggtttaggaagctttgcctgccatagggagcacaggctgttggggacaggaaaagaggaggcagggaggaggcctgcaccaggatgggggatgtcagtggggagaagcaataagtgttttgaagtctgagatgggacctgctgatggacatggtgacagaagaagacagagagtgagatgatccagcactacctggcacagttgttcagtttgtgcactgcacaaaagcactcagtggaggaggctgaactctggctggctccctactccccattctgggcatcctggcaccatctcccagagggaaggggctttctgtcagtttgcacatagtcccccacagactagacaatccccaggtcctgagaggaggggaaaggtgtttcctgggacaaggaggaggaggttgggcagaggtggctggttggaacaggttggatgctgagaaggggtcagctgggcaggagtggggcccgggaggctggagcacagattctggggtcatcatagcatctcctcccacagctcatggctgacgccgtggccaccttcctgcagctggctgaccagtgtctgacgacggccctcaactgtgaccaggctgcccagaggctggagagagtcagggggcgcgtgctgaaggtgtgttctgtgggtacggggtggcatggggtggcagtgggcctgggtgctcagatggttgctggacgcaccgctgggtgtgttgtgcagaaattcaaatcggacagcgggttggcgcagaggaggttcatccgaggctggggtctctgcatctttttaccttttgtgctgagccaactcgagccaggctgcaaaaaggtgagttaatgggaagtgtgcaagagggtctgacagcatcaccatgcatccacttaaagtgggcaagaatgctctttgaggctgggcgcagtggctcatgcctgtaatcccagcaatttgggaggccaaggcaggcagatcacaaggtcaggagttcgagactagcctggctaacatagtgaaaccctgtctctactaaaaatacaaaaaattagccaggcatggtgatgggcgcctgtaattccagctactcaggaggctgaagcaggaaaatcgcttgaacccgggaggggaaggttgcagtgagccgagatcgcgccattgcactccagcctgggcgacagagtgaaactcagtctcaaaaaaaaaaaaaaaaaagaatgctctttgatcattagagaccatttgaccttaatcctagcactttgggaggccaaagtgtggggattgcttgaggccaggagatcagtctgtacaacatagtgaaactccatctctataaaaatacagaagttagccaggcgtgacagcatgtgcctgtggtcccagctactctggaggccaagaggtgggaggatcaattgagcctaggaagtcgaggctgcagtgagctaggatcgcaccactgcactccagcctgggcaacagagcaagggcctgtctctttttaagagacttccataccctgagccctggagctgggtcaggtggcttttctgggcttccacaatgccctctgcttcacctatgacggggttcattaccctgtgtctgccacagaagagctgggatgggtcccacacatcgcatatcacctggtgacatgggcatcagtggagggaggaggtggatggagagtgggtaagggttgggtggggagttaccagggagtcaggaaggatgtccctgtgaaatgaaggcatgggccatgtcccgggaagggcattccaggcagagggcacagcatgtgcaaaggccctgaggcctgaccatgcctggtgtgttggaggaacagtgacaaggtgggtgtggctgaagctcagtgagtggaagagtgggaaggaggtcagcgggagtcctaggtacctaggcacacagggctcatgggcaccaggcgggtgtctgacatgggtacaaacagaatcctctagaggaagtggctgggaattggggaagtctcagctgagacactcatactattccctgtgaggtgtgatttgctgtgcctaattaatcccatgaatcctttccacaacactagagaatatgggccactgagtccattttaaagataaggaaactgaggccaggcgtggtggcacatgcctgtaatagcagcactttgggatagtgagaccccacctctacaaaaaatacaagaattcgccagatgtggtggtgcacgcctgtagtccaagctacttgggaggccgaggtgggaggatcgcttgagcctgggaggtcaaggctgcagcgagccatgactgcacccctgtagtccagcctgggtgacagagagagactattttatttattttattttattttattttattttattttattttattttattttattttatttttagacggagtctcactctgtcgcccaggctgtagtgcagtggtgtgatcttggctcactgcaacctccacctcctaggttcaagcgatcctcccatctcagcctcccaagtagctgggattacaggcacccgctatagggaccagccccacagggtcggtgggtctctccctgtgtgcagagacaagagagtgtagaaataaagacacaagacaaagagataaaagaaaagacagctgggcccgggggaccactactaccaagttgcggagaccggtagtggccccgaatgtctggctgcgctgttatttattggatacaaagcaaaaggggcagggtaaagagtgtgagtcatctccaatgataggtaaggtcacgtgggtcatgtgtccactggacagggggcccctccctgcctggcagctgaggcagagagagagaggagacaaagagaaagacagcttaagccattatttctgcatatcagagacttttagtactttcactaactgactactgctatctagaaggcagagccaggtgtacaggatggaacacgaaggcggactaggagcgagaccactgaagcacagcatcacagggagacggttaggtctctggataactgtgggcaagcctgactgatatcaggccctccacaagaggtggaggagcagagtcttctctaaactcccccggagaaaaggagactccctttcccggtctgctaagtagccggtgtttttccttgacacttttcgctaccgctagaccacggtctgcctggcaacaggcatcttcccagacgctggcgtcaccgctagaccaaggagcccttctgctggccctgtccgggcataacagaaggctcgcactcttgtcttctggtcatacctcactatgccccctcagctcctatctctgtatggcctggtttttcctaggttatgattgtagagtgaggattattataatattggaataaagagtaactgctaccaactaatcattaatgatattcatatataatcatatctaatatctatatctggtataactattcttgttttatattttgttatactggaacagctcatgtcctcggtctcttgcctcagcacctgggtggcttgccgcccacaacccgccaccacgcccagctaatttttgtacttttagtagagacggtggtttcaccatgttggtcaggctggtcttgaactcctgacctcatgatccgcccacctcagccaaccaaagtgctgggattacaggcatgagccaccgcacccggcctgtttattttaaaataaaaatatttaaaaataaagataaggaaactaaggcccaagccccgccccccaaccccacagctaatcaggcccagggctagggcagaagcctgtgttgtaggcctctagaggggccctcctctccatccgagcccctaacccgccatggttccaggagctgcctgagttcgagggggatgtccttgccgtgggcagccaggctctgaccactgagggcatctatgaggacgtcatccgggggtgcttgctgcagaggattgaccaaggtgagtcccgccctgccatggctcagaggagcctggcgtcccttggctgtatgtaccgagccccaccagggccacatcgactctcacttcctgtgaatacttgccatttgaccttaagtcaggacttggcctgaggaggtccagggtagaggagctcagaggggcagggatggatactctctgaaggaagggccgttggactggggctgtgagggatgtataggagttctcaggatgagaagaaggaggcagagttcaaaaactactgatagaggctgggtgtggtggctcacacctgtaatcccagcactttggaaggctgaggtgggcagatcacttgaggtcaggagtttgagaccagcctgtccaacatggtgaaaccccgtctctactaaaaatacaaaaaattagccgggcatgatggcacatgcctgtagtcccagctactcgggaggctgaggcagcagaatcgcttgaacccaggaggcggaggttgcagtgagacaagatcgcgccactgcactgcagcctggcgacagaacgagactatgtcttttttttttttttttttttttgagacagagtctcgctctgtcacccaggctggagtgcagtggaacgatcttggctcactgcaacctctgcctcctgggttcaagtgattctcctgcctcagcctcccgagtagctgggactacaggcatgtgccaccacgcccggctaatttttgtatttttagtagagatggggtttcaccatgttggtcaggctggtctcaaactcctgacatcgtgatcctccccccttgggctcccaaagtgctgggattacaggcgtgagccaccgcacccggccaagactccatcttttattttttattttatttttgagacagagtctcactctgtcacccaggcaggagtgcaatggcatggtctcggctcactgcaacctccgcctcctgggttcaagccattctcctgtctcagcctccaagtagctgggactacaggtgcatgccagcacacctggctaatttttgaatttttagtagagatggggtttcactatgttggccaggctggtctcgaactcatgacctcgtgatccgcctgacttggcctcccaaagtgctgggattaccggcgtgagagacatcgtcttaaaacaaacaaaactacggatagacatttaaatttattcatttaacaaccactccctgtttttctctgggctggcattgaggccctagaggttttcagacttggagttggcctcttaggagctcccgagctgggaaggagctccagaaacatctttctccctcctgcttcctgagttcattcatggattaattaatgcccatgatcactgagatgtgtgcactgattggggggtgaacaggatgcagtggggattcagggaatgtgagcatccatgcagccagcacaagggcacggagcgggaggctggaggctgctggaagatgcgcaaggccttgaatgacaggcagaggaatttagacttatggtgcaggcagtggggagccatggagggtgtgtgagcagaggtcaacagaagccagactggaagtgagggaggaggctgaggccccggttctgggaacaaaggacaggcccgagcaggggcagcagccaagggaacagagtctaggagggaggtgcgggtgggagctggaggtgccagaagtgttgggcttcaggtgtcactaagtgaaggagaggggttccacaagccagggaaggtgtgtggagaacagaggggaatctcaaagagccctcatttgaaggaaagaggaagaacagacatagaaggtgagttcagcagccaggcactgtggctcacgcctgtaaacccagcactttgggaggttgaggagggtggatcactggaggtcaggagtttgagaccagcttggccaacatggtgaaaccccgtctctactaaaaatacaaaaattagctgggcatggtggcacatgcctgtagtcccagctacttgggaggctgaggcaggagaatggcgtgaacccaggaggcggagcttgcagtgagccgagattgcaccactgcactccagcctgggcgacagagcgagactccatctcaaaaaaaagttgtttttttttttttaaataaggtgaggtcagagagttgggagacacccccatagatggtgggttcttgggagccagggaatgagggagaggatgtgtctgtgagcatctaaacaagaaaaatggagcttccttaaaatagcagaagttttaaataggaataaaagctattttctgactgcagaattaaatccagaaacagttgacctcaataagtttctcttcctaaagattttatgtatccttaagtgggtccatcctgaattgatttgtgatgtctgcctagagcagcatgttgggaggtgggactggcagtgtccaggctcagtgaagggtgcagggatcggttagcaatgtctgccatgggtgcgggcttggagagaggctctatgtgagccacctctttaggatttctgcttgagacatttgtagtctctctgggaaaatgcagggaagccccttgatgcctgggcttccccaggtgtgtccaagagttcatctcatttcagaattgaaaaagacccttggtgccaatgatgtatcctgcactctggacggctgcttggaggtcccatgggaacaggagggagcaggtggggaacttcacaggcttctgaaacatgccagtgattgctgggggtggggaggtggaggcccacatggggtgtatgggattgtcatgagtgtgggttcatggacggaacagaatgcactttgtctccttacccagccagcctggccaagctcgtgaacaagctcagtgggaagttgtggagtgcatctgagccacagagggaccctctaaacccaggctctgacatgcatgtgagctcagccctggggggctgagattgtggtgaatttgtgtcccatctctctctctctctctctcttttttttttttttgagacagagtctagatctgttgcccaggctggaatgcataatctcagctcactgcaacctcctcctcccaggttcaagtgaatctcctgcctcagcctcccgagtagctgggactacaggcggcacatgccaccatgcccagctaatttttgtatttttaatagagatggggtttcaccatgttggccaggctggtctcgaactcctgacctcacatgatctgactgcctcagcctcccaaagtgctgggattacagatgtgagccaccaggcccagcctttgtatcccatctctaatcctaggacttagggggcatctcccaatggctacttcctgtcgccaacttggaaagggagattgtagtgacaggggccttaggtttaccaccagcaagagcttccaagatggccataatttgggggataatttttttatgcagcaatagctaactaatacacttcctagctgatctgggacagagaaactgatcaatatttacactaacttggataaatagttaaacagtcctagaaagacttctaaggccaggcacagtggctcatgcctggaatcccagcactctgggaggccaagataggtggattgcttgagcctgggagtttgagaccagcctggacaacatagcaagaccctgtctctacaaaaattttaaaaattagttgggtgtggtggaatgcacctgtagtcccagctacccgggaggcccaggtgggaggtttacttgagccgtggagatggggtggcattgaactatgattgcaccactgccctctagcccgggccacagagagagaccctgtctcaaaaacacaaactaacaaatacaaacatgagtgttagaatatttcaggatttgcaattggatgtgagggattgtagatgggcccctgaatttatttaaccagaaccaaaccaacaggcatttggtttctagtcttccatactaacagccaatgccacagggattaatcttgtacatactttttttttttttttttttttttcaaatgcaggttcctgtgggcaaatcccgcaatgggaaccctcagaatttaaagtatgtgtgtttgtcatttcaacagagggctgtccaccagggtagcctcactggtgcccctcacctttgtccgggaggtttaggagctgcttttagctccttttctgagaaccttctctcctatccttcaccctttcatcttttggctgcttatacatttctttttctttttatttatttatttatttattttttgagatggagtgtcgctctgtcaccaggctggagtgcagtggcagcatcttggctcactgtaacctccaccttgcgggttcaagcaattctcctgcctcagcctccccagtagctgggattacaggcgtccaccaccacgcccggctacttttgtatttttagtagacatggggtttcaccatgtcggccaggctgattttgaactcctgacctcaggtgatccacctgcctcggcctcccaaagtgctgggattacaagcgtgagccactgcacccggcctacatttctttttttttatttttattttttgagatggagtttcgctcttgtcacccgggctggagtgcaatggcgcgatctcggctaactgcaacctctgcctctcgggttcaagcgattctcatgcctcagcctcccgagtagctgggattacaggcgcccaccaccatgcccagctaatttttgtatttttagtaaagatgaggtttcaccatgttggccaagctggtcttgaactcctgatccttggtctcccagagtgctgggattacaggcatgagccattgcgcccagccaacatctctattaactctgattttttaagcacttattacatgccaggcatctgacacatctgatttttgacgtccgtatattttccattatacagatgaggaaactgaggctgagcgggaaggaggggcttgtcccaggcagccagactctggtgcccagatccagccactctgcccaccgccttctccaggaacattccggagctgaatcttcacccacatctatcttgtttctattggataaatgtctacaagtggaatttctgggccaaaacggatgtgccatctttaggcttttgtaacccctgcaacttcagaaaactgtaccattttatactccaagcagcagcatttatttgtgtattttccccaaggctttctttattttaattttttttttttttttgagactgagtcttgctctgtcacccgggctggagtgcagtggcaggatctcggctcactgcaacctccgcctcccgggttcaagcgattctcctgcctcagcctcccgagtagctgagatttcaggcacccgccaccatgcctggttaatttttgtgtttttagtagagatggggtttcaccatgttggccaggctggtctcgaactcctgtccttaagtgatctgcccccctcagcctcccaaagtgctgggattacaggtgtgagccaccacacgtggcctaattttttttttttaaataatagagacaaggtctcgctatgctgcccaggctgatctcaaactcctggactcaagcaatcctcctgccttggcctcccaaagtgctaggattataggagtgatccactatgtccagcctccaaatcctttctaaacactaggacttttcatgaaaagaaaaaagctatgccagttagacacacacagaaatctcatgattttattttgaatttctttgactaaattgaacttacaaataagtttattatggccaggcgtggcagtgcacacctgtaatcccagcactttgggaggctgaggcgggcagatcacttgagctcaggagttcaagaccagcctggcgaacatagtgagacctcatctctacaaaaaatacaaaattagcggccgggagtggtggctcacgcctgtcatcccagcactttgggaggctgagacaggtggattgcttgagccaaggagttttgaggccagcttgggcaatgtggtgaaacctgtctctactaaaaaataaaataaataaataaataaataaataaataaataaataaataaaatttaaaagaagctgggctgagatgggagatttacctgagcctgggaactcaaggctgcagtgagtggtgattgcaccactgcactccagcctgggtgatgggagtgagaccctgtctcaaaaaacaaaatccaaatatgttgattagccatttacatgtttgtagtttttttttttttaatttcagtgaattgcctgttcatagcttttttctacttttcaggagtgtttgcatttttcttattgatatctaataactctttatatctgaaggatatgaacgctttgtgatacaggttacagattttggggtttttttctccgcttgctgtgagccttttgggtttgtttcctagctccaaatcttaacttggtgtcaagtttcctggctgggagacaagcttttaccgacttcctctgcttgccagcaaagtcatctgctaactggatattggcagcttctctgctgtcttgcagctgcttccggagtgggttccacagggattcccgtgtgttcttggttcagcttgcagagggactttcacactccctggagaccgtttcctcccattctgtctggagttttcggcctaccccaagacaatgagatattcctgacctttccacctatttccctccaaccccaccttccgaaatacatttgctcaatacatttgcacttcataggcttctttagctgtcttccttttaccccggacgggatgtagatgttaattctggaacaattgcagctacaagaatttgtcatcctgccccttttgagaaaaacattgtttgcccttgggtctaaatccttccagatgggatgggatgtatcttgtcacctcctttttcttacttaatatgaaaagacctttcctcatcaagtccacagagtgtaaatttgtttttacctttttttttttttttttgagacggtgtctcactctgtcacccaggctggaatgcagtggtgcgattttggctcactgcaacctccacctcctgggttcaagtgattctcctgcctcggcctccgtagtagctgggattacaggcgaagcgccaccatgaccggctaattttttgtgtttttagaagagatgggggcttcaccatattgaccaagctggtctcgaactcctgacctcaagtgatccgcctgcctcagcctcccaaaatgctgggattacaggcgtgagccactgcacctggcctgtatcattcttaaaaattaagttttagcggggcatgatggctcactggtaatcccagcagtttgggaggctgaagggggaggattacttgagaccaggagtttgagaacagccggggcaacatagcgagactccatctctacaaaaaatttaaaaattagctgggcgtggttgagtgcacttgtagtcccagctacttgggaggctgaggcaggaggatcagttgagcccaggaggttgaggctgcagtgagccatgatcatgtgatcatgccactgcactctagcctgagccacagagtaagaccctctctgtgaaaataataataagctgggcgcggtggctcacgcctgtaatcccagcactttgggaggctgaggtgggcggatcaggaggtcaggagttcgagaccagcctggccaatatggtgaaaccccatctctactataaacaaaaattagccgggcgtggtggcgcgtgcctgtagtcccagctactcaggaggctgaagcaggagaatcgcttgaacccgggaggcggaggttgcagtgagccgagatcgcgccactgtactctagccggggcaatggagtgagacgctgtctcaaaaaaaaaaaaaaagaaaataataataataataataataatgttcagatgtattttttaaagtttttattgtttttaaaaatagaggcacggtcttgctatgttgcaccactgcactccagcccgggcaacaaagccagactccgtctcaaaaaaaaaaaaaaaaaagtgtgatactaagtcaatcaatttgaaaatgcggctctagagtattggaaaacaatcccttgacagcgtttccatgaaaacatggcccttgtctctggaagagcttgtgcccagaacggtccattatcatgccctggctctattttcacgccaaccctatagggtctctatgatctcattttatagatggacagactgaggctcacatatagcaagcccaaggcggggactgaatgtgacgccaggtctgtggacgtcatgacctttattctccacaaccctcaatgacatccctgtgagatccaaaaccaggatggcaaaacccacgttgcagcagaggaaactgaggctaaggtctcttgggtcccaaaccaggtcctaagtagccaagtccgcctggtggcacagcccgggttttatacatggggaaattgggcggcgcatctggcggaggtctcagtggtaggaggcgcctggaggaagcgcgggttcctaaccctaacgctacccctaacatcccttccacgcgctccgagcgctatgtgcctttaagatcggtgcgggggcggggcgtcctgggtagggctgcaggtgacgtcactccgggccttgggactcggagagcgtctggaggcggggcctggacttcacgcccggcgcgctcctcccctttaaggcgcgcggccgggcggggcccctatgacccctttaaggcgcggccagagtcctcccgcagaaaaacgacttaaaggagacgcgtggcgcgatggcggcggccccacgcgcgggccggcggcgcgggcagccgctcctggcgctgctgcttctgctgctggcgccactgccgccgggggccccgccgggcgccgacgcctacttccccgaggagcgctggagcccggagtcgcccctgcaggcgccgcgcgtgctcatcgcgctgttggcgcgaaacgcggcccacgcgttgcccaccacgctgggcgcactcgagcggctgcggcacccgcgggagcgcacggcgctatggtgagtcgagcccgctgtccccatcaggcgggtcacgcgagcccctgcttgctgtccccataggggtgggtccacgcgagcccctgcccgctgtcctcttctgggcgggtccgcgcgtgcttcctgctcgctacccccatcgggacggttctacgcatgcccctgcccgctgcccccatcgggacgggtccacgcgtgccccctgcctgctgtcctcccatggggccagacacagccctccccacaacacaagcgggaccgagttcctcctgctggctcctttggggtgggctgggcaccgcttctgcctgctggaccctactagggcagctccggcctcactaactggggctctaactccctctggggcacgtacacctccaaaggacggagcccagagcccccactggggcgttgccagaggccacatctaacagcaagcctttctgtgccggctgctgcccttaagcttgaactcagcctggctccaggccccagtcaaacccctgccctcagaccggcgtgggtggagtccaggaccagatggcccaggaggaagtggatgctttcttggtagggaatggggcagagctctgaagaaacctttgactggtgacttctcactccctgcctcagttttctcaaatggaaaatgggtccgggtgcagtggctcacgcagtaatcctagcaatttgggaggccaaggtaagcgggtcacttgagctcaggagttcgacaccagccttgccaacatggcaaaaccccgtctctagaaaaaaaatacaaaaattagccaggtgcggtggtgtgtgcctgtagtcccagctattcaggaggctgacgcaggagaatcgcttgagcccaggagttcgaggctgcagtgacctatgattgcaccactgcactccagcctgggctacagagtaagacctgcctctaaaaaaagaaaaagaaaagaaaatgagcgtattaatataattctctttttgggtttgtctctgaagattatccagttaatggatgtggagcccttgggtctggcatgggcttggctctcagtgattttattatcatgattactgtcattgctggtgttattgtcaacttaatttattgggcagaattagcttttggcactacggtcaaactaaactcccaaatgtcgcttttccttccacctgatttctcagtctggataatccaaatacacaattggtacttaacaaatgtttgttgaatgaataattgactgcagcccactgaagtggtgtggctcacaggagaagatgaaggcagggtaagggatttatgagatatactttgagatatacttttttttttctctcagacggaatcttgctctgtcgcccaggctggagtacagtgacacgatctcagctcattgcaacctccgcctccgggttcaagtgattctcctgcctcagcctcccgagtagcttgggattacaggtgcgcaccaccatgcctggctaatttttgtatttttaatagagtcagggtttcaccattgtggccaggcttgtgttgatctcctgacctcatgatctgcctgcctcggcctccctaagtgctgggattacaggcatgagccacagcgccctgctgagatatacttttttttttgatacagggttttacatctgtcgcccaggcgggagtgcagtggtgcaatcctagctcactgcaacttccccctcctgggctcaagtgattctcctgcctcagcttcttgagtaactgggactacaggcgtatgccactgcgcccagctaatttttgtattttttctagagatggggttttgccctattggccaggctggtctcgaactcccgagctcaagtgacctgcccacctcggcctcccaacatattgggattacaggcgtgagccattgcacccagctggtttctgatatatacatttcattttttaatattttttatttatttattttttgagactgagtctcgctctcgttgctgaggctggagtgcagtggcacgatctcggctcactgcaacctcctcctcccaggttcaagcgattctcctgcctcggcctcctgagtagctgggattacaggtgcccgccaccacacccagctaattttttgtgtttttagtagagatgggatttcaccatgttggccaggctaggctcaaactcctggcctcaagtgattcacccgcctcggcctcccaaagtgctggaattacaagcgtgagccaccatgcccggcctaatttttgtatttttagtagagatggggtttcgccatgttggccaggctggtctcaaactcctgacctcaggtgatacacccgcctcggcctctcaaagtgctgggatgacaggcgtgagccaccgtgcctggcctgatctatacattacaaaaattgccgtgtgcggtggctcattcctgtcatcccagcactttgggaggctgaggcaggtggatcacctgaggtcaggagttcgagagcagcctggccaacatggcgaaaccccatctctactaaaaatgcaaaaattagctgggcatggtggtgggcacctgtaatcccagctactcgggaggctgaggcaggagaattgcttggacctggtaggcggagattgcagtgaaccaagattgtgccactgcactctagcctgggtgacagagcaagactctgtctcaaaagaaaaaaaaaattaagtgacacatatttgttagtgaatgtggtttgcaagatcttagatgctcagtaataaaacagccaatcactaatgggtctttccaaaatcagcttgtttaatccttccacttcccagtaaactgggtcctgttcccacccccatgttacagatgaggaaactgacatggaaagggagaaatgggccgggcgcggtggctcacgcttgttaagtccagcactttgggaggccaaggtgggcggatcacgaggtcaggagatcgagaccagcctggccaacatggtgaaaccccgtctctactaaaaatacaaaaaaattagccgggtgtggtggcgggcgcctgtagtcccagctacttgggaggctgagacaggagaaggcgtgaacccgggaggcggagcttgcagtgagccgagatcgcgccactgcactccagcctgggcaacagagcgagactctgtctcaaaaaaaaacaaaggaaagggagaagtgtcctgtccagggatacatagctggtgggaggccagttggggatggtggtccttgacttgcctcactgctgcctggtcctgcctcagtctccccaagtacgctgcctgtcccctctccctgcagggtggctacggaccacaacatggataacacgtcaactgtgctgcgggagtggctggtggccgtgaagagtttgtaccattccgtggagtggcggccagcagaggagcccaggtgagcatctttcccctgctcctagtctgattgggctttgcctctgctcacacaccctctatggctccccattgccccagaacaattacaggccctcagtccctgcctccagcccagccaggcagcattaagctactctgagcctccctcagctttacaaataggccataatcctcttctcagacctttgcccaagccgttccctgtacctagaattctttcactccctttttcttctggggacgcccactgctttgttccctggctcactgactcagtcttggtcccagcactggctttgctgtttatctactccctaaagccctgggcagcatggactccctgcccccacccagttcctttctgggtttttgttttttttttgagacagggtctcactccctcacccaggctggagtgcagtggagtgaacacagcttactgcagcctttaactcctgggctcaagccatcctcccgcctcagcctcctgagtagctgggactacaggcacatgtaaccatgcctagctaatgtttttgtattttttgtagagatagggtctcactgtgttgcccaggctggtctcaaagtgctggcctcaagcgatcctcccacctctgcctcccaaagtgctgggatcgcaggcgtgggccactgcactggaccccactgagcttccttccttccttccctccagtgtgcctcgggctttcttccctccaggcctttgcacaggctgtacctccggccaggaacattctccccacttctctttcctcgtcgtttactttttcccatccctcagatcagcttacacgtcccctcctccaggaagctctctctgagtaccccgaaggcagctcaggccctcgctgggctttgatagtgccttgtgatgtccacatcacagctgcctccccataggtcctacccggacgaggaaggcccgaaacactggtctgactcacgctacgagcatgtcatgaagttgcgccaggcagccctgaaatcagctcgagacatgtgggctgattacatcctggtaagtttctcagccggccggatatggatcacaggcaggtctgggtatccccagggaaggcggagcagcaggatgccaggaccatccttaatgttgttttgcagaagggtaaactgaggcttagagaggggagatgagttgcttgaggtgatatggttggtcagtggaggaggagctgggattcatttgatcctcagcactaggaatgaatgggcttttctgtccccagttgtcccctgtgtttggacacttgggtcaagtccatttttatttttttatttttttgagacagagactcactctggtgcccaggctggagtgaagtgccgcaatatcggctcactgcaacctctgcctcctgggttcaagcgattcccgtgccacagcctcctgagtagctgggaccacaggcacccaccaccacgcccggctaattttttatttttatttttgtggaagccaggcatggtggctcatgcctataatcccagcactttaggaggccaaggcgggtggatcacttgaggtcaggaggtcgagaccagcctggtcaatatggtgagactccatctctactaaaaatacaaaaattagccgggcgtggtggcaggtgcctgtaatcccggctacctgggaggctgaggcaggaggatttcttgaacctaggaggcagaggttgcagtgagccgagatcgtgccactgcactccagtcactgggcgacacagtgagactccatctcataaataaatacataaataaatatttttaaaaaataacaaataaaaaatatttttgtagagacggggtcttgctatgttgcccaggctggtctccaacccctgggctcaagtgatcttcctgcctcggcctcccaaagtgctgggattacaggcatgggccaccgtgcctggccgtgtcacgtctgtttttatcaccatcatatgtaatggccaaacctttgggtcacttccaagaagcaggaggaaggggtcaggggctggggggtggtggccacattgaattgctgaggcctgacttgcacttcctcctcctgtggggacattgtctcatggggaagggaacagttgagtctttttatttttttctcgagccaagatcacgccactgcactccaacctgggccacagtatgagactctgtctcaaaaaaaaaaaaaaaaaaaaaaaaacagacttataggttgaatattactattattttttaatttgtataaacttatggagcacaagtgtaattctgttacatgcatagattgtgaagtggtgaagtcagagattttggggcgtccatcccctaaataatatacattgaacccattacacagttttctatgatcaaccccaaatgttatttcagccttcatacttttctatattctcctgattttcttttttcttgttttttgagacagagtctctgttgcccaggttggagtgcagtggcacaatctcggctcactgcagcctcctcctcctgggttcaagcaattcttctgcctcagcctcctgggtagctgggattacaggcccccgccatcatgcctggctaatttttgtaattttagtagagacggggtttcgccatgttggccaggctggtctctaaagtcctgacctcaggtgatccagctgcctcggcctcccaaagtgctgggattataggtgtgagccaccacatccagcccatctcttaaaacaaacaaacaaaaagcagaaaagaaaaagcaaagagtcaagtgagcaaagtgattacgatgcagtggtggctagaggtccaactacacaggccagtggaggcacttggtgtctacttggaggggaatggggagccatggagggtgtgtgagcaggggaggtctgtgttctgatttgagattttcagaagcctctgtggaccaggcgcggtggctcatgcctctaaattcagtactttgagtggctgaggcaagtggattgtttgacttcaggagtttgagaccagcctggtcaacatggtgaaaccctgtttctaccaaaatataaacattagcttggcatggtgatgcgcgcctgtaaccccagctacttgggaggctgaggcaggagaatgtcttgaacccgggaggcagaggttgcagtgagctgagattgcaccactgcgctccagcctgggcgacagagtgagactatgtctcaaaaaaaaaaagccacacactagcaggaagctggagtagaggcccaagcagggtatcagcgattgatggacaggcctgcatggggtgggggccgtggagaaaggcagggggttcaggatgcgtcacgaggtgaaggagacaggttctgctttgacactggatgtgaaggtgccagggagagaggaacggggacagtgccacatctagggaggacggatggagctcctgaggggaccctttcgcttggtgccttatcagaccattttataggtgaggaaacaggctgacggaggggacatcttgcctggtggggtgtcagaactggcaaggaggcagagaggtggatctggagccttccagagccttctgacacaaagctgccttgtcctgcctctaggattttgcttttgtggtttgaggttgcctggctttagcttttttttccctcagcaaaccggggtggaactcaaagtgctggttcaaaactcaaagtggcttttgacacaaaataatattttcgtgtttctttttttttttttttttttttgagacagtgtctcactctgtcgcccaggctggagtgcagtggcgcgatcttggctcactgcagcctccacctcctggggtcaagtgactctcctgcttcggcctcccaagtagctgggactacagatgcttgccaccatgcccggctatttttttttttgtgacggagtctcactctgtcgcccaggctggagtgcagtggtgcgatctcagctcactgcaagctctgcctcccaggttcatgccattttcctgcctcagcctcctgaatagctgggactacaggcgcccgccacaacacccggctaattttttgtatttttagtagagacagggtttcaccgtgttggccagcatggtctcgatctcctgacctcgtgatccacccggcttggcctcccaaagtgctgggattacaggcgtgagccagcgcgcctggcccgactaattttttttgtatttttgtagagacagggtttcactatgctgaccaggctgatctcgaactcctgacttcaggtgatccacccacctcgtcctcccaaagtactactgggattaccggtgtgagccactgcgcctggtcacaaaattatatttttgtaactggggactttggaacccatattggaatgtgaaatagtttgtctaatgttttaaaatgattgtttgaaggtccccctttctctctctttttacaaaagctatggatgttacttgcaggtaaaaaaaataaataaaaatatacgagctgggtgtgtctcacgcctgtaatcccagtgcttcaggaggccaatgtgggaggatcatttgaggtcaggagttcaaaaccagcctgggcaacatagtgagaccccccccatctctacaaaaactaacaaaaaaaaaaaattagccaggtgtactggtttgtgtctgtagtcccagctaattgggaggctgaggtgggaggattgcttgagcccaggagtaggaggctgcaatcagccatgattgtgtcactgtactccagcttgggtgacagagcgagaccctttcttaagcttcgtatatgtgtatgtgtgtgtgtatgtgtgtgcgtgtgtgtatacatatatacatatatacgtgtatatgtatatatatctatatatgtatataaacatatatacgtgtgtgtgtgtataatatagatatacatatgaaacaagaaagaaaaacatctactttttttttttttttttttttgagatggagtctcattttgtcacccaggctagagtgcagtggcgccatctcggctcactgcaacctctgccttctgggttcaagcaattttcctgcctcagcctccggagtacctgggattacaggtgcccgccaccatgcctggctaagtttttgtatttttagtggagatggggtttcgccatgttggccaggctggtcttgaactcctgacctcaagtgatcacctgcctcagcctcccaaagtgctaggattgcaggcgtgagccaccgcccctggccagcatctaaattttaattgtatctcctggagagattcactttctcctctttcttgtttgttttaattgaagtcagttcacatatatatttatttgttttgcaaccaccacctctaattctagaacattttcattccccagaaagaaaaccctattcccatcagcagtcactccccaactccccattcctctcccctaggctctggcagccactaatctgcttcctgtctacggatttgtcaatggaatgtcacactatatggcgtttcgtgtctggtttctctcactcagcattgagttttcagggttcattacagcctggatcagtgcttccttcctttgtatggctgactcttattccgttgtctgggtggaccacgttatgttgatctcctcatccgttgatggacacacttcagtcacttccaccttttttggctgttgagactttttttttgagacagagtgttgctctgtcgcgcaggtttgcagtgcagtggcacgatctcggctcactgcaacctccatctcctgggttcaagcgattctcctgcgttagtctcccgagtagctgaaattacaggcatgtgtcaccatgcccggctaattatttttatttatttttatttttagtagagacggggtttcaccgtgttgcccaggctggtcttggactcttgacctcatgtgatctgcctgccttggcatcccaaagtgctaggattacaggtgtgagccactgcacccggcctggctgttgggattctgacatgaacatgagcgtacaaagacctgtttgaattatctgggcatggtggtgcgcgcctgtatttaatcccagctactcaggaggctgaggcaggagaatcatctgaacctaggaggtggaggttgcagtgagccgagatcacaccactgcacttcagcctgggtgactgagcaagactctgtctcaaaaacaaacaaacaaacaaagaagctgtttgagtcctttctttcaattctcttggttcatacctaggaatggaattcctggatcatgtagtaattctatgtttagctttttgaggaactgccacagtgatctggctgtttgttctgcattaatattcaaaggtcacagattcaaacatccagagggaccggatggggtgtgtaacatgaccacagggcttgtcctaagacccagccacctcccctctgcaactgaaggttgccatgtggaaatggtattctcacgttgccaggggatactggaattctagtttttgttgttgttcatggcagttaatccaaatattctaaacgatactgcctgggtaacagaaagcatctctgtggaccagcagtaaaagaaaaaaaatccagaccgggcacaatggctcacacctgtaatcccagcactttgggaggccgaggcaggcgtatcacttgaaatcaagagttcgagaccagcctggccaacctggtgaaaccccatctctaccaaaaaatacaaaaattagcctgacgtggtggcatgtgtctgtaatcccagctacttgggagactcagggagaattgcttgaacatgggaggtggaggttgcagtgagccgagatcacgccgctgcactccagcctatgcaacaggagacgccatctcaaaaaaacaaaaacaaaaacaaaaaaccttctggtagttctgtgatatatcatgacttctgtgtctttacatcctggtagagggggaacgtccggacctaatcattttctatgtgtgattttatatatatatatttaattttagtctaggtgcagtggctcagacctgtaatctcagaactattgtaggccatggggaggatcgctttgagcccaggagttcaaaaccaccctaggcaatgtagagggatcctatctctacaaacataaaaataaaaatgaaaacattatctaggcatggtgacgtgtgcctgtacgctcagctacttgagaggctgagatgagaggatcacttgagcccagaaactccaggctgcagtgggctacgattacaccattgcacttcagcctgagtgacacagcaagatgctatccctttaaaaaataaaaaatgaagaaaaagtaaaatagtaggccaggcatggtggctcatgcctgtaatcccagcactttgagaggccgaggtggacgaatcacatgaggtcaggagtttaaaaccagcctggccaacatgatggtaccctgtctctattaaaaatacaaaaagttacccgggtgtgatggtgcacggctgtagtcgcagctactcgggaggctgagacaggagaatcgcttgaacccaggaggcggaggttgcagcgagctgagaccataccactgcactccagcctgggtgacagagcgagactccgtctcaaaaaaaaaaaggttttgctaccttcttgctcattggttgttcatttatttctcagggctatctcagtgcctagaattttctttgaaggaactgaagacctttgctttatttccatgatccaggggatcctgcaggcccccaaaacggggtccctgcttcatttcatccggtgtagggggtgcttccagaggtctttgccagacccccagggcactggcctttgccccagctgttctgaatggtagcctgacctggcagcccatgctgatgctttgtggggtgttctgcagtttgtagatgcggacaacctgatcctcaaccctgacacactgagcctgctcatcgctgagaacaagacggtggtcgcccccatgctggattcccgggctgcgtactccaacttctggtgtggaatgacttcccaggtagagtgagggcctggggactgtggggactgggctgagcaggggggtgccgtggctagagtgtaacttactgtcacacaacctcgtggtgtgtgttttacaaaaatcatcatggaagctgggcacggtggctcacacctgtaaccccagcactttgggagactgcggcaggcgggttgcctgagctcaggagtttgagaccatcctgggcaacatggtgaaaccccatctctactaaaaaaaaaaaaaattacagaaattagccgggtatggtggcacatgcctgtcctcccagctgctcgggaggctgaagcatgagaatcacttgaacccaggaggcggaagttgcagtgagccgagatcacgccactgcactccagcctgggtgacggagtgagacttggtctcaaaaacaaaacaaaacaaaaactcattatggtaatctttaaacagccctctgaggccagacaggagggaagaatagagggtccttgattgtcccccaccatgctattccagaggtggaaacagaaacacagagaggaagtgacttgcctaaagtcacacagctagcaagtggtggtgtcaggatgggacttcaggcatggcttgatccaggtgtttggataactgtctttctccatcctttgggtgggttcattctcagacagcttgagagtgatcccagcagcgtctagccatcatccattctgattgggccattgctagtctcctctccacactacctctgaactcattactgaagctgggaaaatacaaggctctttcttattggccatgcctggccacaggtcccacactgggcttgagtctggggtcctgggaccacaggcgcacactgctgtgcctggctgtctgtctggtcctgtttcatgccgcccactatcacgggtctccatcctcacctttcaagacccctacgcggaactctcgctctctccccacagggctactacaagcgcacacctgcctacatccctatccgcaagcgagaccgccggggctgctttgcagttcccatggtgcactcgaccttcctgatcgacctgcggaaggcggcgtccaggaacctggccttctacccacctcaccctgactacacctggtcctttgacgacatcatcgtctttgccttctcctgcaagcaggcaggtacgtacatgaggggtctgccatcgcaggggcatctgcctggttctttgggttttgcactaagccagttcagaacacactgaagattcacagaacccaaacaatgcagcgcagggctgacttcaggtgcagctgtatctaggtgttcagataatgtctccaggaccccgtttctctccagccctggctttgctggttagcttcattccctagctctttaagatctattggttggtcaggcagagtggcttatgcctgtaatcccaacaatttggcaggctaaggcgggtggatcatttgaggtcaggagtttgagaccagcctggccaacatggtgaaaccccatctctactaaaaatacaaaaattagccggacgtggtggtgctactggggaggctgaggcgggaggatcacttgaatatgggaggcggaagttgcagtgagccgagatcatgccactgcactccagcctgggcaacaaagtaagaatccttctcaagaaaaaaatacctattgattgcatgttactattattttttaatttgtgtaaatttatggagcacaagtgtaattttgtcacgtgcatagattgtgaagtggtgagtcaagagattttagggcatccatccccaaataatatacattgaacccgttacacaattttccatgatcaaccccaaatgttatttcaatcttcatacttttctatattctcccaattttcttttgttttttttttttgaagtagagtcttgctctgtcacctaggctagagtgcagtggtgcgatctcggctcactgcaacctctgcctcctggttcaagagattctcctgcctcagcctcccaagtagctgggattacaggcatacgccaccatgtctggctcatttttatatttatagtagagacagggtttccccaggttggccaggctggtctcaaactcctgaccccaggtgatccgcccacctcggcctcccaaagtgccgggattacaggagggagccactgcacctgggccattctcctaattttctacagttgagcatatattaattgtttaattgggaaaacaaatatttaaagagacagcacagcctcatgttgacttgttgtttactggaaaccagaggttggcaaactgacctgcaggccaaacctggcccactaattactttttttttttttttttttttgagacggagtctcgctctgtcgcccaggctggagtgcagtggcccgatcttggctcactgtaagctccgcctcctgggttcacgccattctcctgcctcagctttccgcgtagctgggactacaggcaccagccaccaggcccggctaatttttgtatttttagtagagacggggtttcactgtgttagccaggatggtcttgatctcttgaccttgtgatctgcccacctcggcctcccagagtgctgggattacaggcgtgagccaccgcgcctggccccactaattacttttatatggccacaagctaacaacaacttttatattttatttttatttttttagagacacagtcttactctgtcacccagcctggagtgcagtggtgtgatcgtagctcactgcagcctcaacctcctgggctcaagcaatcctctcatctcagcctccagactggctggggctataggcacctgcctacatgcccagctaattgaaaaaaaaaatgtttttgtagagatggggtcttgctatgttgcccagactagacttgaactcctggccttaagtgatccttcccacctcagcctcccaaagcgctaggaatacaaacgtgagctacggtgcctggccaacaatttttacatttttattatttatttatttatttgacacagggtctccctccgttgcccaggctggagtacagtggcatgatctcagctcactgcaacctccacctcccaggttcaattgattctcctgccttagcctccctagtagctgggactacaggtgtgcaccaccacgcctggctaatttttgtatttttagtagagatggggttttgcctgttggccaggctggtctcgaactcctgacctcaggtgattcacccgcctcagcctcacaaaatgctgggattacgggcatgagccaccacacccggccaatttttacatttttaaatcactggggaaaagaatcaaaagaagaagaatattgtgacacatgaaaactgtatgaaattcagatttcattgcccatcaataaagtgtcatcagtacccagccaagcccattcatttaagtgtcgtctgtagctgctttcaagtgccacaggcagaacagagtcattgagatagaaaccgtctggcacacaagcctaaaatacttaccacctggccctttatagaagaaattgaccaattaaaattaaaagaggccgggtgtagtggctcatgcctgtaatcccagcactttgggagggtgaggtgggtggatcacatgaggtcaagagtttgaggccagcctggccaacatggtgaaacccgtctctgctaaaaatacaaaaattggctgggcatggtggtgggtgcctgtagtcccagctacttgggaggctgaggcacaagaattgtttgaacccaggaggcagtgaacggagatcacaccactgcaatccagcctgggcgacagagcgagactctgtctcaaaaaaaataaataaattaaattaaaagagcatcattgagttttttagtctaaaaaagatacacacttggctgggctcagtggatcacttgaggtcaggatttcgagaccagcctggccaacgtggtgaaaccccacctctactaaaaaaaaatacagaaattagctgggtgtggtggcgggtgcctgtaatcccagctacttgggaggctgaggcaggagaattgcttgaaccccagaggcggaggttgcagtgagccgaggtggcaccactgaactccagcctgggcgacagaacgagactctgtctcaaaaaaaaagatacacactcatcaaaatttaaaccatccagaaaaggatagatgtagaaggaagtaacttaactcacattttgtcaaactttcctttttgtgcctcaacatgcatttttactgttttttttttgggtttgtttttgagacagggccttgccctgttgcctaagctggagtgcagtgtgccatcatagctcatggcagcctcaagtctcctgggctcaagtgatcctcctgccacagcctcccgaggagctgggaccataggcaggtaccaccattcccagctaattttaaaattatttgtagagccgggcgtggtggctcatacctgtaatcccagcacttcaggaggccaagacaggtggatcgcgaggtcaggagatcgagaccatcctggctaacatgatgaaaccccgtctctacaaatacaaaaaattagccaggcatggtggcatgtgcctgtagtctcagctactagggaggctgaggcaggagaatcacttgaacccgggaggcggaggttgcagtgagccaaggtagtgccactgcactccagcctgggagagtgagactctgtcttaaaaaaaaaaaaaagttgtttgtagatataaggtcttgctctgttgcccaggctggtctcagacacctgacctcaagcgatcctcctgcgttggcctcctgaagccgtgggatggaaggcatgagccactgggcctcgcctgtttttacatttgtctgttgcttccctgcccactgcagaggttcagatgtatgtgtgcaacaaggaggagtacggattcttgccagtgccattgcgcgcccacagcaccctccaggatgaggccgagagcttcatgcatgtgcagctggaggtcatgggtgagtctgcctgcacaccgccctgggaggtgccaggttgcctccctttcactgatgtctcaaatccgtcccatgagcactgactgagtgccaggcagatgcaagtccctgtggggggtgctgggtgcaacggcacgtgtgaacgaggtggagggttgtgtctgctctcacagagtgctggtttgcaggtagctgtacacagcatgcttggggttgtcgggtgggcttcctggaggaggtggcattaaggggcaggttgagtaggagttcaccataaaggggattgcagcaggaggtggtagtgtgggcaaaggccgggaggctggaagggacgtgaacctggggaacaggcaaggtcagtgatcccctggggctggtatccagggccagggtggatggcctcagagaccaggctgaggaagggaccttccccctgaggacagtcaggagctatagaggacatgaaaactgagaggacagcaagttttcactaaagaactgcatgtataggccaggcatggtgactcaaacctgtaattccagcactttgggaggccaaagtaagaggattgcttgagcctaggagttcaagatcagcctgggcaacatagtgagaccccatctctatattaaaaaaaattttggccgggtgcggtggctcatgcctgtaatcctaacacttcgggaggacgagacgggcggatcacaaggtcaaaagatggagaccatactgaccaacatggtgaaaccctgtctctactaaaaatacaaaaaaaattagctgggtgtggtagcgaatgcctatagtcccagctacttgggaggctgaggcaggagaatcacttgaacctgggaggcggaggttgcagtgagccgagatcgtgccactgcacttcagcctggcaacagagtgaaactccgtctcaaaaaaaaaaatttttttttaattagtccgacatggtggcacatgcctgtattctagctactcaggaggctgaggtgggagaatcctttgagcccaggagttggaggccgcagtgagccataatcgtgccactgcactacagcctgggcaatagagtaagtctgtctcaaaaataataataataaaaaataattatcccagctctttgggaggccaaggtgggcggatccctggaacccagtagtttgagaatatcgtgggcaacatggtgaaaccttgtctttaccaaaaaaaaataacaaaaattagccaggcgtgatggcacacacctgtggtcccagctactcgggaggctgaggcgagaggatcccttgagcccaggaggtcgaagctgcagtgagccaagattgcttcactgcactccagcctgggcagcagagccagaccctgtatcaataaataaataaataaaactttaaaaaaatccatgaactatgaaaccagcagccgtccctctaaaactggaggagcacgcagggctgagctgtaattgaggttgtctagggatgatgctcccatctcagccattgctaatgtgggcctcgccctgcactgggcgcagaaagccctgccaaagccactgccattcccaccactgcgtagatggagactgggtgggaggggtgaggcctctgtcccggggctcagtttccccagccttaccgatttctgaacgagtctatctgcggctccccctggtggctcaagatggaatagcaccctgccctttgtgttttggggagactttttttttttttttgagacggtgtctcactttgtcacccaggctggaatgcagtggcgcattctgggctcacttgaaacctccgcctcctgggttcaagcgattcccctgcctcagcctcccgagtagttgggattacaggtacctgccaccacacctggcaaattttgtatttttagtagagacggggtttcaccatgttagccaggctggcctcgaactcctgtcctcaggtgatccacctgcctcggcctcccagaatgctgggattacaggcgtgtgtcactgcgcctggcctgggggagacttttgagtctttttgaggtgacacctggagactgcacaatcactggggcaggccccccacaacacccaagagtggcatacttaggtgtccaggtcccacccggctacagttgggggtggtgggtctccatttatcaccaactcccatcagaaacgggcctgagaagcgtctctgtggctaccagagttttcccagtttaagttctcacatatatttgtgttgtcatttcctttttttgagacagagtctcgctgttacccaggctggaatgcagtggcaaaatcacagctcactgcagcctcaacctccttgactcaagcgatccttccacctcagcctcctaagtagctgagaccacaggtgcatgccactaccatgctcagctaatttgttaatttaggtttttggtttttttggtttttatttttttgagatggagtcttgcactgtcgcctgggctggagtgcaatggtgcgatcttggctcactgcaacctccgcctcccaggttcaagtgattctgccccaccttcccaagtagctgagtttaacaggcgcttgccaccacgcctggctaattttttgtatttttatttttattattttttgtttgtttgttttttttgagacggagtctcgctctgtctcccaggctggagtgcagtggcccgatctcggctcactgcaagctccgcttcctgggttcacgccattctcctgcctcagcctcccgagtagctgggactacaggcgcctgctaccacatccggctaattttttgtatttttattggagatggggtttcactgtgttaacctggatggcctcgatctcctgaccttgtgagccacctgcctcggcctcccaaagtgctgggattacaggcatgagccactgcgcccagctagttttttgtatttttagtggggacagggtttcagtatgttggccaggctggtctcgaactcctgacctcatgatctgcccacctcagcctcccaaagtgctgggattacaggcatgaaccactgtgcccggccttcttttttgctttttttggagatggagtctctgtcacccaggctggagtgcagtgtcaccatcatagctcgctgcagccttgaactcctgggcaatccttctgcctcagcctcccaaggagctacagatttccccttttaaaagcacacaagccatgtggattagggcccaccctaatgacctcattttaactcgatgacctctgtacacaaccctgtgtccaaataggatcatatcctggggtactggtggttggcactggggagacacagttcaccccatgacatagtgcatgatctcatgacatctctttgtgaaacctctcagtggcttattggcccattttatagatgaggaaagctgaggcccaggccaatcaagaatatacagcatgccatcatttcttggttcattctacaagcaattactgagtgcctgctgtgtgccaagcccctgtgttgggcactaggggcccagtgtgagcagacatacctggtgtccttcccaaagggctcacaacagacaggcacagggccagggggttagggcagcaaggatgcgagctttggtggtgcaagtccaggtgctgctggggcccagaggaggtgcctggctcagcctagggaggtgggagtggggagggtgacccccatgcccagggcatcatagctgagaagtaacgttacagagcagggaaaggaagggtatttcaagcagggatccagcatgtgcaaaggccctgaggtaggaatgggggttctttgggttggcaggggcatagaggtggggctggggggtagagtgaagctggagcatggggcgtggccagggcttagaggcagggttgggggcggagtgaagctggagcccagggcgtggccacggctgagagtcggggctgggagcagggtgaagctggggcctggggtgtgaccaggacttagaagcggggctgggggtcggagcgaagctgttgcatggccagggtttaaaggtggggctgggggggtgcagggtgaagttggagcctggggcatggccagggcttagaggcaaggctgggggaggctgtggggtgaagctggggcctggggcgtggccagggctgagtggtgcggctggggggcaggttgaagctgtagcctggggtgtggccagggcttagaggcggggctaagggcagggtgaggctgggacctggggcgagtccagggttgagtagcggggccttgggcgcggtgaagctggggcctggggtgtggccagggctgagaggcaggactgggggcggggtgaagctggggcctggggtgtggccagggctttgggctgctgtgcagggttcaaatgacatgggaggggctcctagagggcagcgctgatgtgggcggagccaggtcgactttgtgggccgagccagtctgactgggagccatggagtgggtggggaaagcgtgttggagagaggctggaggctccttaccccagcgactcctcaacgtctgtgccccacagtgaagcacccgcccgcagagccctcccgcttcatctcggctcccaccaagacaccggacaagatgggcttcgacgaggtgagctgggccttccctggaggcggggcgggggctggagggcccttgtttgcaggggctgatctggctggggactctccgggctgcaggtcttcatgatcaacctgaggcggcggcaggaccggcgggagcgcatgctgcgggcgctgcaggcacaggagatcgagtgccggctggtggaggccgtggacggcaagtgagtccgaggcctgggggtgggggggcgggtccgcacgtggatgtgggtgtagacctcgctggtagacggcaagtgattcagatgggggcgggcgtggtgtccaaacagatgtagacctcgtcagtgggcgtcctgaaggggaagtgaatgggaccctggggaaggggcagatcctcacagttgtagaccatggaaggcaagtgagtcctgacccaggggaatgggtaggtttgcatgctgccagtgtagactggtggggactgtggaggggtaagtcagtcagaccccaggagaggaggagagcaggtttgcccgcgagtgtataccatgtgcaggtgagtgaggccccatgtgcccggaaggggtgccagtgctacaagaggtggaccagctgctcaacgccgcagggggtggtggaatggccggggatggcagaatggcaggcagggtgaaccttcttcgtgaccctctcctcctcctctccagagccatgaacaccagccaggtggaggcgctggggatccagatgctgcctggctaccgggacccctaccacggccggcccctcaccaagggtgagctgggctgcttcctgagccactacaacatctggaaggaggtgtgtcctgagtgatgggcggggccagagttatgactctagatctcatcggagatttggacgggaaaggggttgaaagagttccccaaagccccggctaggcatccagcctcagccatgggacccatggcctctctttagtgaatgatgcgccacaccagctgtatcacccccaggtgtacctgccatccttccattgcgcaaatgtggaaactgagcctgggggtaggggtgagcccttttgagcagcaggtggtgtctggggcctgggacctgtaaacaaatcctcattactcccagcctggtctctgtgcttgatgtttagtactagaagtcatggccacagagccactttaaaccagcacctgcccagtgctgctgggggcactcaccagcccaggcatcctcatccaccctcagagggagaggctgtgattggaggagggtgtctgactaggcttcgaacttgggccatcagggccgggcatggtggcgcacacctgtggtcccaactatttgggaggctaaagtgggagagtggcttgagcccaggagttaaggctgcagtcagccaagatcgtgccactgcactgcagactggacagcagagcaaaaccgtgtctcagaaaaaagaaaaatggctgggcgtggtggctcatgcctgtaatctcagcactttgggaggccgaggcaggcggatcaccttaggtcaggagttcaagaccagcctggccaacatggtgaaacctagactctactaaaaatacaaaaattatctgggtgtggtggtgggcacctgtaatccctctacttgggagactgaggcaggagaatcacttgaacccaggaggcagaggttgcagtgggctgaaatcatgccattgcactccagcctgggcgacaagagtgacactccatctcaaaaaaagaaaaataaaatccgggcgtagtggcacatgcctgtaatcccagctgctcaggaggctgaggcagaattacttgaacctgggaggcggaggttgcagttgagatcgttccactgcactccagcctgggcgacagggcgagactccgtctcaaaaaaaaaaaaaaagaaaaagaaaagaaaaacttgttatcgaatgtgaagccaaatgggggtgtgcggctgcaaggcgggaggtgcatgaggcgtgggcatttgaggggctgggaggcctttctcttctgagatccattatggacggcagagggcagaggtttggatgtccagatgtccctggagctaggagaggcagggagatgcactggcttctctacgggtctttcaaaccttctcaaagcaaagctctgtgctttagggtcaggcctggccttggcctccctgtgatgtggcggggcttcctccctcaggtggtggaccgggggctgcagaaatcgcttgtgtttgaggatgacctgcgttttgagatcttcttcaagagacgtctgatgaacctcatgcgggatgtggagcgggagggcctggactgggacctcatgtgagtgggggtctgaggatggggtgaagctggggcctggggcaaggccaggacttagaggtgggggtgggggcagggtggagctgggacctggggatgggtcatggcttagaggcggggcttgaaggtggggtggaactggagcctaggtacatggccagggcttagaggtggggctgggaggcggagtggagctgaatcctacgggcgtggccacagcgctgcagctgagcctagagcctgtatgtctgggtgtggtcagggtggcaggcgtggccaacccttggaagcgtagcaggagggctcacgtggttcctgggcctgaaggcactgtcagggctgtagcctatagggaagggcgttggaaggatcacccagaactcaagggacctggccggaagcctgcaggcttggtcaaggcttagagacttgactgaggcctgtggaggtggatgtggctaaaatttgaccgggcagcctgtgggcgtggctgaagagcatgggggtgtggtcagagctggaggtgtggccgaagagtgtgggggcgtggccagggcgcctggtcttagacaagcccctggatgggagtgccaccaacatgtttccagcactggagccgtccttctcttctgtaagtgggctggtttgtcctctcccttcctccatctcttttttcccttccatgtgcagtgccctaatctgcattctgggaacactgccccatgtgaatagtaactgcacccctccattcctgactgcccccccatcagggcacctcgcccacctccacccccactgtcctctgaactcagagcagcttcagcctcagagaacgtctgcgtgatcctgctctccccagctccagatcctccatggctccctcacgccctttggaaaaactcactcttctcccccatgaccgccagacccctgggctcctgcattcactccatccagtcacagagctctgcaaacatgctgagcctgctcccatcccaggacctgacggggtaactagatccctggctttctgggcaagctccctccggagggcgggaggagagtgacaggcccgatcttgcaccccagctatgtgggccggaagcggatgcaggtggagcaccccgagaaggctgtgcctcgcgtgaggaacctggtggaggccgactattcctactggaccctggcctacgtgatctccctgcaaggcgcccgcaaactgctggctgctgagccgctctccaagatgctgcctgtggacgagttcctgcccgtcatgttcgacaaacacccagtgtgagaggggcaggcggctgctgggctggggtttcacggtgggtctgtcctgggagaatggggatgtgagactcacggcctccgagaagatgtctcttcttttgcctacttctccctccgtttgccccctcgcagatctgtctccatttgtatcccctgcacacttacgttttaatctgtccccgctgacttcttcacccccaatttttcctccagctgtcccgtcccctgaagccattgctgcccctcactcccctcctcctccccccaggtccgagtacaaggcccacttctccctccgcaacctgcatgccttctctgtggagccgctgctcatctaccccacacactacacaggagacgatggctatgtgagtgacaccgagacctcagtcgtatggaacaatgagcacgtcaagaccgactgggaccgcgccaagtcccagaagatgcgggagcagcaggcactgagccgtgaggccaagaactcggacgtgctccagtccccactggacagtgctgcccgggatgaactctgaggggtagcagccagaaagccaaagcagccatcggtggcccaggctccacgtgcttactgaggacatcaggtccacctctggaccccttggcaggccacagagggctctcgtgtggggtggtgtccagccagctcttgctaagcaatcacgtgcacacaggcagcattaatggagtgcctactgcatgccagcaacagggcttggccctggggaattgggaggaaccaagccctcttcatctgttcatgtgcccagcatttattaagcacctgctgtatgcaaggttcccatgttacggcagtgaatgaggcataattgttccctccatcagcgattgattcagtcatcaagcagttactgatcagattaagaatcaggcactagtgatacacattcatttttaaaattcattcaaggatttattgagtgcctactgtgtgttgggtgccattccaggctctgggatttttttttttttttttttaagagtagagtctgtctctgtcacccaggctggagtgcagtggtgtgacggctcactgcagcctgcgcctcccagcgtccagcaattcttgtttctcggcctcccaagtagctgggactataggtgcgtgccatcacatctggctagtttttgtatttttagtagagacggggtttcaccatgttggccaggctggtctcgaactcctgacctcaagtgatctgcccgccttggccacccaaagtgctagggttacaggcatgagccactgtgcccagcccaggctctgggaatattgagataaataagatgcttctatccatttattcaagcacatattggtcacctactgtgtgcctggcactcatgtcacaaagataagttcctgattcggtacacttactgagcacctgctgtgtgcagggagctgagctatgggatgggaatgggagtaaacaaggtactttttacttttttctttttttcctcactgctagacggtgtgggaacttctcactcattggcttctttcccacacacctgaagagcactgactgtgtgccgggcactagtgatacaaaagagtgtgacagttgttcagtctgcattttcgatcatgggctacatgccgagtgctggggcacagagatgaacaagatcggttccttcacttcttcatgccacaagtgtttattgagcacctgtgtgccaggcctcacagactcccagttgggttgaagaatggttgactgagtttgattcttcctgtaccctcggtcgtctgagctgtgtgcagacaacatccccccaccacccaagagggagggtagctcttccgccaccaggggcaagcacaggtcctggtggccccacgccacatgttagcccccctggagggggcgccagttggagacgggggctgggtgtccctggcccactcccggtcccctgtgctttacctccttgcccttgtgtctcaggtgtggtccctgcctgcttgatgaagttgctctgttcaagcctttggtgggatcatgtgtttgggggcttttaggggacccagctgcactggggcactgcccgtggcctgggtaggacatttcccagcaagggctggaggagttgccgtgccttcagcctgaatcgaatgtcagaaccagccagcggtgcttcaccctcttggggataacttgcttagttttttaataaatgttcctggttggttttcacagcagtttgtgggattttgctcggcaccaaaacactgcccacgttccccacccctggatggccgacaagatttgggaggaaaccagggcaggtgcagtagggaagctgcccagtggggcctggcatggtggctcatgcctgtaatcccggtgctttgggaggctaaggtgggcggatcacttgaggtcaggaattcaagaccagcctggccaacatggtgaaaccccctctctattaaaagtacaaaaattagcctagtgtagtggggcggggtggcggggggggggtacctgtaatcctcgctacttgggaggctgaggcaggagaatcgcttgaacctgggaggtggaggttgcagtgacccaagattgagccactgccctccagcctgggcggcagagcaagacacaatcaaaccaaaaaaaaaaaaaaaaagctggccagtggagctactgtggggtgagggtgtggtaagagccctgtgtcccctcatgccataaaacttcccccaaacaggcgggggaccgacagctctgtcttgagtcaacttcaggatccttccacatgacttcgaataaagaggggctgtcgtgctttgagtccccctaaaacagacctcaacatgaggattagggctgggcatggtggttcacgcctgtaatcccagcactttgggaggccaaggtgggtggatcacctgaggtcaggagttcgagaccagcctgatcaataagatgaaatcccgtctctactaaaaatgcaaaaagcagccaggcatggtggtgtgtgacagtagtcccagctacttgggaggctgaggcaggagaatcgcttgaacgcaggaggtggaggttgcagtgagctgaaatcttgccactgcactccagcctgggcaacagaatgagactccatctcaaaaaaaaaaaaggattaggctgggtgaggtggctcactcctataatcccaatgctttgggaggttgaggaggtgagaggattgcttgaggtcaggagctcaagaccagcttgggcaacagagtgagaccctcgtctctacaaaaaaaattgagaaattagttgggcatggtagggcacacctgtaatctggctactcaggaggctgaagcaggagtatctcttgagtctaggaggttgaggctgcagtgaaccatgatcacaccactgcactccagcctgggcaacagagcaagaccctgtttctataaaacaaaaccagaaaacttccctgaaatagcccagggacaggtggccaacttcattctatcttggatcaaccacaggatcgtcgcagatgacttcaaatgaggaggggctgtcatggtttgggtcccctgaaacagactccaagatgaggattgaagggcacttacgttatcagtgaccccaggaacttgctgtggagcagtagggaagtgagacaagaagggaaagagtggtcccaccccagggagagggggctggacattacaacatgcccagttgcatttggattttctgggtcaaatgcttacaaatcctctggattattacacctttagggtgtgcaagaatatacccgagacttttataaactaacacaggggccaggcgcggtggctcacacctgtaatcccagcactttgggaggccgaggctggtggatcatgaggtcaggagttcgagaccagcctggccaatatggtgaaaccccgtctctactaaaaatacagaaaaattagctgggcatggtggtgagcgcctgtagtcccagctacttggaggctgaggcagaagaatcacttgaacctgggaggcggaggttgtagtgagccgagatcacgccactgcactccagcctgggcgacagagcaacactcttgtctcaaaaaacaaaaaacaaacaacaacaaaaaaccctaacactgatggtgttcaatcagtgtggaaaaaatcagaacttacagctaagcaaattgacaaagcaaaaattaaatcacaccttttcagacacaactaacattttcaaaaactttccagccttccttatttgcatggtgtaaatatatatgcattttttaaaaaaggaggaccatgttacctaagctactgcaacttgccgttttatttttcgtggaatgcacttttattttctaagcatgggatcaaactgtacctattttttaaaaaacaacttttatttttaaatttaacaactattgtggacctcctttccaaaatagggttaacatctacgagctctttttggattgttatggaaaatattccctgctgtttcctgcagtggatagcattatacaatacatctttcctactggattttttgtttttttgtgtttttttgtttgttttgttttgctttttgagacggagtcacactctgtcacccaggctggagagcagtgatacgatcttgactcactgcaacctccgcctcctgggttcaagcaattctcctgcctcagcctcctgagtaatagattacaggcgcccgcaccacacctggagaatttttgtatttttagtagagatggggtttcaccatgttggccaggctggtcttgaactcctgactacaagtgatccacccgccttggctcccaaagtgctgggattgcaggcgtgagccactgcacctggcttcctactggattttaaaatttcagttgggtaaattgagacaggtgggattcctggattaacctggatgtgcacttcaggtttcagtagaggctatcatattcctttttcttattgaatcctaactattcatcatctattggccagagtgaattatccatgtttattaaacagtcccttctgtgaaacatttttttttctttgaggcagagtctcactctgtcgcccaggctggagtgtagtggcatgatcttggctcactgcaacctccgcccccaccctgggttcaaacaattttcctgcctcagcctccctagtagctgggattacagacgcctgccacaatgcccggctagtttttgtacttttagtagaaacagggtttcaccatgttggccaggctggtctcaaacttctgacctcaggtggtcctcccgcttcggcctcccaaagtgctgggattacaggcatgagccaccgcacccagccccttctgtgaaagatttttttctcatgctttgcagggaagtttctaaatcttatttaacccagtgaggctcaaccaggagtaattttgttcttcaggggacatttggcaatgtcccctaaacatcctacaatgctaacaccatcctacattgtacatcctatgcaggaggatgcagctaaatatcctacaatggccaggacgccccaccatacagaacgttccagtccagaatgttcatagtgctgagactaagaattcctgtacccggccaggtatggtggctcgtgcttgtaatcccagcactttgggaggttgaggcaggcagatcacttgaccctaggagtttgagaccagcctgggcaaaaccctgtctctacaaaaaaatagaaacacttagccatgtgtgttgtcacgtgtctgtgccccccagcctcgggaggctgaaatgggaggattgctggagcctacgaggttgaggctacagtgagcagtgattgtaccactgcactccagcctgggctacagagcgagaccctgtctcgaaaaaataaaaataaaaaaagaatccctgtacccaattcctttcagcctcttggggacatgagtctttagaaggatcttctctgtggtacgaagtgaagcttcctttactatgaaatttatctgaataaagcatagattcgcaggctctgctcacagactaaaggattagaacttggaggtagctgggtgcagtggctcacacctgtaatcccagcaatttgggaggccgaggcgggaggatcacctgaggtcaggagttcgagaccagcctgaccaacatggcaaaaccctgtctctactaaaaatacaaaaaaattagctgggcgtggtgacgcatgcctgtaatcccagctacttaggaggccgagacaggagaatcgcttgaactggggaggcagaggttgcagtgagccgagatcgtgccattgcactccagcctgggcgcaaaactccatctaaaaaaaaaaaaaaaagaacttggaggtgatgcctgggaattaaattttattttgaaggcccccaaacagttatgtaactctggtgttgcttttgacctctgcaccttcaggagaacctcatccttccttctggaactttctaaatacacacacacacaatgtatacttttcttgtctttgtaaaaattttattattactattttctgagacagggtctcgttctgttgcctaggctggagtccaatggtgcaatcatggttcactgcagcctcaagctcccaggcttaagtgatcttcccacctcagcctcctaagtagccaggactacagacatgagccactatgcccagctaattttttattttttgtagagatgacggtcttgctatgttgcccatcctggtctcgagctcctgggctgcagcaatcctccccgctcagcttatcaaaatgctggaattacaggcatgagccactgcacctggcacctttattttatgaatgctatttttaattgtaaagtgattcttattcatggggacacccttcagttggtctattggctattagttccctattgctactctaacacatttccacaaacttagtcgcttaaaacaacatcaatgtattcttgtatggttttgaaggccagaattctgaaatcagtttcactgggctaatgtcaaatcaagctgaggctgggtgcggttgctcacgcctataatcccagcactttggaaggctgaggtgggtgggtcacttgaggtcagcagttcgagaccagcctggccaatatggggaaatcccatctctactaaaaatacaaaaattagctgggcatggtggcacacacctgtagtcccagctacttgggaggctgaggcaggagaattgaggagaacccgggaggcggaggtggcagtgagctgagataggggccattgcactccagcctgggcaacagagcaagactctgtctcaaaaaaaaaaaaaaaaaaaaatcaagctgggtgcagtggcacacacctgtaatcccagctaccctgtaatcccagctactcgggaggccgaggcaggagaatcgtttgagcccaggagttcaagatcagcctgggtaacatagtgagacccccatctctaaaaataaataaataagtaaaaataaattcaagtcagcagggttggtttcttctggaggatctaggggggaatccttctctttgtcttttctggcttctgaaacccactggcatcttttttgtttttttttaatttttttgagactaagtccagctctgtcaccctggctggagtgcagtggcacgatctcagctcacagcaacctctgcttcccaggttcaagtgattgtcatgcctcagcctcccgagtagctgggattacaggcgcccaccaccatgcccagctaatttttgtatttttgatagggagggggtttcaccattttggccaggccggtcttgaacgcctgacttcaggtgattttcctgccttggcctcccaaagtgctgggattacaggcatgaaccaccatgccccatccccactggcatctttttttttatgctttaaacaatttttttttttagaattcaaaagcaaactctggatcctgagcttaactgtaatggagtagattacattccatttatttttgtaaattattttattttttcattgatgacttagagggactatcttcaaaccagtacaaatatttcatagataatacctggccaatttctaaccaattgagtaatttgttgcataataagctacctcaagtctttcagcaagaaatacattaaatttgaatagtgaagacattacacaatgaattaggacataattaaaatttgctttaaatatttctttggtggagagaacaccacacttctgctcaatgaagagaaacattttcatactccagaggcattttattttattttattttatttttttgagacggagtctcgctgtgtcgcccaggctggagtgcagtgacgtgatctcggctcactacaacctccgcctcccgggttcaagcaatgcttctgcctcagcctcccgagtagctgagactacaggcacctgccaccatgcccggctcatttctgtacttttagtagagacggggtgtcaccatattggtcaggctggtctcaacctcctgaccttgtgatctgcctgcctcggcctcccaaagtgctgggcttacagatgtgagccaccctgcctggccttttatttttttgttaacacctattatgtcatgaattcatagggaagaggttccagcagctaaggctccttcccactggttttcacacagtgtgcttctctgggtggagcaggctggcgcttcagttgaacccaggcacctttctctttggcttctttctttttctgatcattttccttcatgcatttcaggaagctatctcagttcttagagtgcttaatatgctcaatacacacatcaattctcttggcaaggatcttgccctcgtttgtttacaacaatgccaacagcatgctggggaacactgtagattcttccagttttgccatgttaacacttgtggagcatttctttttgaacagtaccttctcttgatgtctacaatatcacctttcttatagattcacatatacgtggccaaaggaacaacttcatgttttctaaaaaagcctagagaacatatatcgggtgcctctcctcttttcctttgtgtttgtcatcttggcaaattactggaagatggcggttctggccgaaaagccccactggtatcctttgcttgtggtcccttcttgtgtcactccaagtcactccaatcctttcaatgctatgtattcacctaacctcttgtctccctcttctaaggacatttgtgattacatttagagcccattcagatgatccaggataatcttgccataatctcaaaatccttgacttaatcatatctgcagggctgggcatggtggcacgtgcctgtagtcccagctgtgaaagaggctgtggtgtgcagtaggattgcttgagcccaggagtttgaggctgcagtgagctatgattgcacctctgcactccagcctgggcagcagggcaagatcttgccaaaaaaaaaaaaaaagaaaagaaaagaaaagaaaaatcacatctgcatctacaaaattccttttgccatttaaagtaacatccatagggccaggtgcagtagctcatgcctgtaatcccagcactttgggaggctgaggtgggtggaacacctgaggtcaggagttcaagaccagcctggccaacatggtaaaacaccatctctactaaaaatataaaaattagctgggtatggtggcaggcgcctataatcccagctacttaggaggccgaggcaggagaatcgcttgcacccaggaagtggaggttgcagtaagctgagatcgcgccactgcactccagcctgggcaacaagagtgaaactccgtctcaaataaataaagtaacatccacaggttctgagcaatagatgtggatatctctcgggggacattatttagcctattgctacagtatcctttggagaggctgagattgtgtcttgctctatggatgtgtcagtcatatgatacatagttatgtatcatagtacagtgtatcagtcatggatcaaggtgggaaaacagaaatcacttgaggtcttttaacagaaaggggtttcatataggaaattgacaatgactccatgctgccattgcagcctgaaaaacaaccacaggcaatacataaatgaatgagcttggctgtgtgccaataaaactttatttgcaaaaaccagtgtggagtcagatttggcctgggggctgaagtttgccatctctgggtacaaaggatcaggactgagtctggtcctacagagatgaccttgaagaagtggctttccaaagcgccccgaggttgtcactgaacagaggaatgctaaaacctcaactgtttccacatctggctgctggcagagtgaaggggaaggaaaaccaagacgactcaagtcccttttgttttccagactcccagaggtgcatctggcaggtgaacttgggcagacaccctgagtctgcccagccacagggagatctgcctgtgtagctggggctttggaatggggtgggacaggggcggatgctgatgtcaacctgccatggatggcttattagcgtaggttacaatgatgatagggacgacggtgtaactgtaggatgcataatcatcgtcactattacatgtaattgcaggatttggagcagagtaattatcatgcaatataatcaattatataatgaaatgtaatctcagacagatcatcaacgacataattgtgttatgccctccaggaaatggaatatgcctctttttgaagttcccgggtggttctgccaggatggctggtggtgggagaagaaggcaagagccaaatggggttaggatgagagggacagtgattggggtgggggtgtttcaggtgacagtggaaggatagtgatgggcgtgagaatagtgtgagagtttagtctgaggttgagagaagtgaggagatgcaggcgaataagttgaagaacaatgaggtcaggttagggattagcaaactggatgagggccaaatctgacatctgacttttttttttttttgaaacggagtttcactcttgtcgcccaggctggagtgcaatggcgcgatcttggctcactgcaacctctgcctcccgcattcaagcgattctcctgcctagcctctggagtagctgggattacaggtgtgtgccaccatgcccggctaatttttgtatttttagtaaagatggggtttcaccatgttgtccaggctggtctcgaactcctgacctcaggtgatccacccgccccggcctcttaaagtgctgggattacgggcgtgagccaccactcctggcctcaaatctgacttgttttaaaaaaaatttggcagggctgggcaccgtggctcatgcctgtaatcccagcactttgggactcacctgaggtcaggagttcgagaccagcctgaccaacatggtgcaaccctgcctctaataaaaatacaaaaattagtcgggcgtggtggcacacacctgtaatcacaggtactcaggagggtgaggcaggagaatcacttgaacccaggaggcagaggttgtggtgagcggagatcgtgccactgtgctccagcctgggcgatagagcgagtctccctcttaaaacaagcaaacaaataaaacaaacaaacaaaaccccaaaaattatttggctgaacacggaatctggaaaaaaaaatttttaaattgaggtaagaatcagacaacataaaattaaccagattaaaatgtccaatttggtggaatttagcacatttgcaatgtcacacgaccatcacctttatcaatttccagaacattttcatccccctaaaaggagatctcgtttctatcagcagtcactctccactccctctcccccagcccctggcaccaccaatctgcttcctgtctctatgtgttcccggaaaggggtcctgatcaagaccccaagagagggttcttggatcttgtgcaagaaagaagtcagggaggccgggcgcggtggctcacgcctgtaatcccagcactttgggaggctgaggtgggcggatcacgaggtcaggagattgagaccatcctggctaacgcagtgaaaccccgtctctgctaaaaatacaaaaaaattagccgggtgtagtggcgggcacctgtagtcccagctactcgggaggctgaggcaggagaatggcatgaacccaggaggcagagcttgcagtgagccgagattgcgccactgagctccagcctgggcaacagagccagactctgtctcaaaaaaaaaaaaaaaaaaaaaagaaagaagtcagggtgagtccatagagtaagtgaaagcaagtttattaggaaagtaaaggaataaagaatggctactccaggccagacacagtggctcacgcctataatcctagcactttgggaagccaaggtgggtggatcacgaggtcaggagactgagaccatcctggctaacacggtgaaaccctgtctctactgaaaatacaaaaaattagctgggcatggtggtgagcgcctgtagtcccagctactcgggaggctgaggcaggagaatggcatgaacccagtgtcaggcctctgagcccaagctaagccatcatatcccctgtgacctgcatgtacacatccagatggccggttcctgccttaactgatgacattgtcttgtgaaattccttctcctggctcatcctggctcaaaagctcccctactgagcaccttgtgacccccactctgcccgccagagaacaacccccctttgactgtaattttcctttatctacccaaatcctataaaatggccccacccttatctcccttcaaggactctcttttcagactcagcccacctgcacccaggtgattaaaagctttattgctcacacaaagcctgtttggtggtctcttcacacagacacgcatgaaatttggtgccgtgactcagatcgggggaccttccttgggagatcaatcccctgtcctcctgttctttgttccataagaaagatccacctacgacctcgggtcctcagaccgaccagcccaagaaacatctcaccaatttcaaatccagtaagcggcctattttcactctcttctccaacctccctcactatccctcaacctctttctcctttcaatattggcgccacacttcaatctctcccttctcttaatttcaattcctttcattttctggtaaagacaaaggagacatgttttatctgtggacccaaaactctggcaccggtcacggactaggaaggcagccttcccttggtgtttaatcattgcaagaacgcctctctgattattcacccacatttcagaggtgtcagaccatgcagggatgcttgccttggtccttcacccttagcggcaagtcccgcttttctaaggggcaagaatccccaatcccttatttccatgccccaacctcttatctctgtgcctcgatcccttatttccatgccccgacctcttatctctgcgccccatcccttatttccgtgccctgacctcttatctctgtgccccaaccccttatttttgcaccctgacccctttctggcttttctggaaggtaagaacccccaaaccccttccctctgtgtctctactctctcttttctctgggcttgcctccttcactataggcaaccttccatgctccactcctccatctcccttagcctgtgctctcaagaacttaaaacctctttgactcacacctgacctaaaacctaaatgccttgttttcttctgcaatgctgcttgaccccaatacaaactcaacagtggttccaaatagccagaaaacggcactttcaatttttccatcctgcaagatctaaataattcttgtcgtaaaataggcaaacagtctgaggtgcctgacgtccaggcattcttttacacatcggtccctccctagtctctgtgcccagtgcaactcgtcccaagtcttccttctttccgtctctcctgtcccctcagtcccatccccaagcgtccctgagtctttctaatcttccttttctacagacccatctgacctctcccctcctccccaggctgctgctcaccaggccgagctaggtcccaattcttcctcagcctccgctcctccaccttgtaatctttttatcacctcccctcctcacacccggtccagtttatagtttcattccgtgactagccctcccccacctgcccagcaatttcctcttaaaaaggtggctgaagctaaaggcatagtcaaggttaatgctcctttttctttatccgacctctcccaaatcagttagcatttagactctttcatcaaacatgaaaaacccagcccagttcgtggctcgttcggcagcaaccctgagacgctttacagccccaaaccctaagaggtcaaaaggctgtcttattctcaatatacattttattacccaatccactcctgacattaaataaaaccccaaaaattaaactccggccctcaaaccccacaacaggacttaattaacctcaccttcaaggtgtacaataataaagtagaggcagccaagtagcaatgtatttctgagctgcagttccttgcctccactgtgagacaaaccccagccacatctccagcacaaaagaactccaaacgcctgaaccgcagtggccagggattcctccagaacctcctccaccaggagcttgctacaagtgccggaaatctggccactgggccaaggaatgcccgcagcccaggattcctcctaagccgtatcccatctgtgtgggaccccactgaaaatcggactgttcaactcacctggcagtcactcccagagcccctggaactctggcccaaggctctctgactccttcccagatcttctcggcttagtggctgaagactgacactgcccgatcacctcggaagccccctagaccatcacggacaccgagcttcaggtaactctcactgtggagggtaagcccatccccttcttaatcaatatggaggctactcactccacattaccttcttttcaagggcctgtttcccttgcctccataactgttgtgggtattgatggccaagcttctaaaccccttaaaactccccgactctggtgccaacttaagacaatactcttttatgcactcctttttagttatccccacctgctcagttcccttattaggccgagacactttaactaaattatctgcttccctgactattcctaggtgacagccacaccacattgccaccttttcccccagttcaaagcctccttcacatcctccccttgtatctccccaccttaacccacaagtataagacacctctactccctccttagcgaccgatcatgcaccccttaccatcccattaaaacctaatcacccttaccccgatcaatgccaatatcccatcccacagcacactttgaaaggattaaaacctgttatcattctcctgttacagcatggccttttaaagcctataaaccctccttaccattccctcattttacctgtcctaaaaccagacgatgcttacaggttagttcaggatctgcgccttatcaaccaaattgttttgcctatccaccccgtggtgccaaacccatatactctcctatcctcaatacctccctctacaacccattattctgttctggatctcaaacatgctttctttactattcctttgcacccttaatcccagcctctcttcgctctcacttggactgaccctgacacccattaggctcagcaaattacctaggctgtactgccgcaaggcttcacagacagcccccattacttcaatcaagcccaaatttcatcctcatctgttacctatctcggcataattctcataaaaacacacgtgctctccctgctgatcgtgtctgattaatctcccaaacctcaatcccttacaaaacaacaactttccttcctaggcatggttagtgcagtcagaattcttacacaagagccaggaccgcaccctgtagcgtttctgtccaaacaacttgaccttactgttttagcctagccctcatgtctgcgtgcagcggctgccactgctttaatacatttagaggccctaaaaatcacaaactatacttaactcactctctacatttctcataacttccaaaatctatttgcttcctcatacctgacgcatatgctttctgctccccggctccttcagctgtactcactctttgttaagtcccacaattaccattgttcctggcccggacttcaatctggcctcccacattattcctgataccacacctgacctccatgactgtatctctctgatccacctgacattcaccccatttcccgatatttccttctttccttttcctcaccctgatcacgcttgatttattgatggcagttccaccaggcctaatcgccacacaccagcaaaggcaggctatgctatagtacaagccactagtccgcctcttagaatctctcatttcctttccatcgtggaaatctgtcctcaaggaaatcacttctcagtgttccatctgctattctactactcctcagggattattcaggccccctcgcttccctacacatcaagctcgaggatttgccccactcaggactggcaaattagctttactcaacatgccccgagtcagataactaaaatacctcttagtctaggtagacactttcactggataggtagaggcctttcctacagggtctgagaaggccaccgctgtcatttcttcccctctgtcagacataattcctcagtttagccttcccacctctatacagtctgataacagaccagcctttattagtcaaatcagccaagcagtttttcaggctcttggtattcagtgaaatctttatatcccttacagtcctccatcttcaggaaaagtagaacggactaaaggtcttttaaaaacacacctcaccaagctcagccaccaacttaaaaaggacggacaatacttttaccactttcccttctcagaagtcagacctgtcctcagaatgctacagggtacagcccatttgagctcctgtatagatgctcctttttcttcacatggacgcccatgaaacccgggaggtggagcttgcagtgagccgaaaccgcgccactgcactccggcctgggtgacagagcaagactccatctcaaaaaaaaaaaaaaaaaaaaagaatggctactccatagacagagcagccccaaggctgctggttgcccattgttatggttatttcttgatgatatgctaaaggaagggtagattattcatgccttgcgtttttagaccaaatagggtaacttcctgatgttgccatggtatttgtaaactgtcatggtgatggggggagtgtagcagtgaggatgaccagaggtcactcttgtcgccatcttggttttggtgggtttgggccagcttctattattgctgttgttgttgagacggagtcttgctctgtcgcccaggctgcagtgcagtggcgcgatctcggctctctgcaagctctgcctcctgggttcacgccattctcctgcctcagcctcccgagtagctgggactacaggcgcccaccaccatgcccggctaattttttgtatttttagtagagacggggtttccttcctttttttttttttttttttgagatggagtttcactcttctcacccaggctggagtgcaatggcaggatctcggctcactgtaacctctgcctcccaggttcaaatgattctccagcctcagcctcccgagtagccgggattacaagcacttgccaccatgcccggctaattttgtatttttagtacagacagggtttcaccatgttggccaggctggtcttgaactcctgacctcaggtgatccactcgcctcagcctcccaaagtgctaggattacaggcgtgagccaccgcgcccggccacttccttcctttttatggctgaatcatattcattgtatgaatagacaacatgttgtgtttatccattcatttgttggtggacacttgagttgtttccaccttttggctattgtgaatagcgctattctgaacacgtccaagggtttgtttgaatatatccgcttgattttctaaataaagttttattggcatgcagtcacgcccatcatttgcatgttgtcaaggttacaatggccgagttggttgcaacagagacagcatagtacacacagcaaatctatttactagctcgccctttacagaaaattttgttgacccctgtattgatcatgaccaaaatgagtctgggaattgggttgggttgcagaaactttacattaggcctggatgaccattctcctctccttctacctgtccagaacaaaggggttacatttcccagcaagcagtcttgagcctcagtccccaagccccattggtaacacgatgggtcccacacactgaaggacaagacttgagacccttttgtagcgaggggcaaatagatccacatcagtcacagtgcgtagcctatgcacttgggtacagaaacagctaatgagcaggggcactcaaggacctgcaggctgcctctgcagacatcatgcagacagctgcggtttgtccccttttcccagctatatgctattctttgagaagataccacacccccacgtgcaagtttctcaaaggagaaaagtcccccaggagcgggattgctgcgtgctggataactcctggtgtaagccactttctggccccacttttagtcctgctgtctgttacttgcaaccaaaagcactcactgaacccactcctggtggtggatcccgcagctcccgtcctgtccgctcaaatgtagaaataaccccagacataaggaggggaatttcggaatttaccgaggaaactgggctgaatgagattccatttctgcttcctcgtgggatggagactcaaaacagaaattaaattcagctgttggaaaatggagtttcattcctcacacatctgagtttatgaaatgagattcccagctgctacttttttttctttttttttttttgagatggagtctcgctccgtcacccaggctggaatgcagtggcgtgatcttggctcactgcaagctccgcctccccagttcacaccattctcctgcctcagcctcccgagtagctggaactacaggtgcctgccaccgtgcccggctaatttttggtacttttagtagagacggggtttcaccgtgttagccaggatggtctcgatctcctgacctcgtgatccacccgcctcggcctcctaaagtgctgggattacaggcgtgagccactgcgcctggccccagctgctacatttaaaacagacatggccaggcacagtggctcacgcctgtaatcccaacactttggagggctgaggagagaggattgcccaaagtgaggagttcgagagcagtctgggcaacatggcgacatcctatcactacaaaaaatacacaaattagccaggtgtggtggtgcacactactcaggaggctgaggtgggaggatcacctgagcctgggaggttgaggatgcagtgagttgagattgtgacactgaactccatcctgggtgacagagcaagaccctgtctcaaaaacaaacaaacaagaagatcccaaaaaacccaacaaaaccaaacaagcatgggggtgtgggttgaattaagggcatgtattcctagtgtttgtatcttaacttccttaagggcaacagatggccgggtgcggtggctcacgcctgtaatcccagcactttgggaggccgagggagtggatcacctgaggtcaggggttcgcgaccagcctggccaacatggtgaaatcctatctctactaaaaatacaaaaattagccaggcaaggtggcgggcgcctgtaatcccagctactcaggaggctaaggcaggagaatcgcttgaatctgggaggtggagattgcagtgagctgagattgcaccactgcattccagcctgggcaacagagacttcatctcaaaaaaaaaaaaaaaaagcaatggttgcaaatgttctgagttcaagtcccagctccatctcttcctggctatgtgatctgagcaagatcttgtctctctgtacttcagtttccttctctgtaaaatggggatgactccagttgcggatgagccgcgttcatgggcaagcagtgtgttctactgagtctgcgcctacctagtaggtgctaatcgtacgtgaggtttttgtttttgtttttttgctgataaaggaatgcaaggaggaggcaaccacgtgtccaaggctgtgtgtggtttttctttttttaatgtctgctgttaataaaatatttttacagagaccaaaaagtcagaatagtgcaaaacatctcaacaccatgcattcatgaccacttctcgtttgtgttaaacatttgttccaagtcacatatttacagagaaatgaaggcgtctgtgcagacactggaccgacggggtagaatcaaaacaaaacaaaaaacaaacaacgttttgatttcacatctgcaatcacatgctaagagttgtgtggaggggaagcctccccggactgcttggccggtttgtgggggtctgagggagcacgagacaggggtggacaggggtcaagtccccctggctgtgtggttggggatgatcaggggaccctccgcctgtgacctgtgtctccagagagccactatggctggacgggggtaaggggtggggtgttacttgacacagtcaacttgatttttctctgaaacaataaaaggcaaagagaaaagcaacacgtgtcagcaaagacaactttggtcctcaacgattcttaggaaaggattctggggagcagacggggttgtgatccgggactaaggccctcccccaacttccccagggtggcagagttccgggaggccccaggttgtccccatctgcaaaatcgacagcacatggggtaggggtaggggacagaaaggctctgagatcccagccgagagaggtcccaaggatttctagttgggtgtttagttttttgcatctctgatgggggcatggtgaggtctcaggctctggggcctgagagaggaattgggggtgtggacaggcacctcctcattttatgcaaatcattcgaggacagactggtaagagtgaacagatccttctttcttcaggacaccctctttacttcccccgacactccctgccttggtctctgcatttatctttctctgtatatttccacctctatgtctctctccatctctgtctctctccgtcctcatcggggcgtgatctcaccctctgtctctgtgttttctactctattcctcttggtcaggggactttgactctgaggcatccctcaatgtcacccctttaacccttgccctgccacaggccaaccttcttgtgctgtttccccgattcatggaaatgtggggccagctccttgcataaagcgaggtccagggttcagaaccctggaggtgtcatccaaggccgggctctgtgtccacttgctgggtggcgttgaggaaagccctgctcctctctgggctttgttctgccaatacaggaacttcctgatttcaaaaggctttcagccccctggactccttgtcttttctctgtccgtgtctcagccatgtccactctctgtcccatgtgtcaggctcagacacctcctatgtgcccaggtccgtgtggaaggggaaggttggtacggacagacatggacagacatgcatgcggatgtgtattctcacactgaccctgccccaatacataattccactaggcgtagactccctgtcacccacttgtgcccagcctgtgctaggtaaagttgggggtcctgagagtcctcagaccccagtctgggagaaacagagctggacagagaaacccccagtcccatggcatcaggctggactggaggagagacggtggctgggaaagtcctgaggggaaggaaggagggttttctccaagaggggtttccgtgatgggttttgaaggacgaataggagttctctgggggaaagaaaagagggtggaaattgcaaaaacagttctagcctgggagtcaggaaaactcattcaacaaatattccctgaagaagcttgtttccttcacatgcctgggccattgctggggaaccctaaacacacacacacacacacggaggtcttgaacagaaagactcctaaggaatcttttgggaaataacttggctctctcaggcagctcgacttccccatttctttccagccatccaaaaatcttccagatcaccctcaccccaggtcacagatcacttcccctttgggctctatgggttacaaccctgaatcatccatccacccgacccctaccctcagccatgtcatggttcgaaattcacatctgctcctcagtccatataacagtcacataagcttatccctggctacaacttcccaaccctgtatgagaatttgcattttaacctttggttcagaacctccagttacctgcacctgtctgaatttaagggacatgcaacatctccaagcaaattagaaagtggcgccacttcttccagacacttgggccattcacatgtcgggaaaccaacgtcacaaacatacaacactcaatatctaggatttgcacgtggccttcttagcaatgccaaacccttgggcactgtgcaactgggacaactgtactcagcagccctagagctcatctaagggcaggatttttttttttttttggtggggtagaggggagggaatggagtattgttctgttgcccaggctggagtgcagttgtgtgatcacgactcactacaacctctgcctccagggttcaaacaattctcccgcctcagtctcctgagtagctgggactacaggcatgcaccactgcacccagctaatttttgtatttttagcagagatggggtttcgccatgttggccaggctggtctcaaactcctgaccttaagtgatctgccagcctcggtctccccaaatgctgggattatagtcatgtccccacagctataggtgtcttttcaacacagccttcagaatctttccaagaatccatttcagtgtccccaaagcacctccacctctcctcactggttttagtcttcacaaaacagcttttgcaggctggaatccagtctctccccaacttaaaacagctcctggagctccccaactgtcttagaataaaagtaaaactcctcaggactgcgtacgaggccctgcctggtctgatgcttctgcagatctccccaaccccaaggctcctcacgatcccccttgctggctcagctccagccgtgccacccttctcgttgtttcaacagttcttctctcctggccttcgcacgtgctgttccccaggcctggagctcttttctctctagtaagtggttccctctcattcttcacctcggaaagcctccccatctgatgttctatcctccagaaacccagctactcagctcaccccgttttcatttctccctagcacagcaaaatcttgtccttcccaatccagcagaaaaaggcgtgccatacacacatgtggaaaagcagatcccagagcaagtgtagtccacgctgaactttcccctaaggtcctatgtgcaccaggtaactccagccaggtcactgtaactttgctcattggagaaagagcttccagctggcaagagggccatctgaggtatcctgtggcttgggtgtttgaatcaatgaataggctcttggagactaagctctcactgtgtcactgtgtttgtgtttctctctctctcattctctttctctcattctctttctcccccctagagtttctggtctccttctgttctttcctatttggaaaattctggaaaaggaagaagggatggagaaacctgggaccaggggatcccaaattctcttttgtggtgggaggccctcatggcatcccccatggagatcccaggagaaagggctgagggcaaaggtcctgcttggcagccggagaaggaaaggcgaagtaggggtcttggcctggaattcccaccccttggaggaggccgagggggaattagcagcaatagggagctgtgtcaggtcatcccgatctcagcccacccttccatggggcacacaggcctaagggaggggcacagagggtatggcacctggaaccttggccaagtctcaagcagctctttaagcctcagttttgccatctgtcaaatgggtgtgttgaactctatgatatgaggactgggtttgttgggggagagggagaggcaaactcccaaagggaagtaggggcagcgtggggaaccagagccgtcccctcggcccccagggtttgggcgcccaagggcgcatgtgcttttgaaatcccatcctcccccctccccccatttattttttgcacaaatatctaaagggactccggtattccggggccctccaaccagcatcctggtccctccagtccccaggccacctagaggggcgctccagagagccctaccccttgcccagggccccccctcgagggagctgagatttccatacttggcaattggtctggggtcccaggggtctgggtcccatcttatggcttttccaggggacatgaggtggtgcctcccggtaccagagccccgggatgtggcctcctccatagggacgaggtttcccccatcccagctcaaaatgccccctaggtgctgggggcgtggcctcaagttggggatgtggctccttccttcgtcgcgcccttgggcgtggcctcccgagagggcggggcatcctccattcctaattccccaaaagggaaagctgagtcaagggcgtaggcgcagcccacccttggcgtggagccccccgagccccgcccctggggaggtcccaccaaggcgcaagccccgtccctccccgcccagcgccctccgcgcaggcgcagtgccgctcggccgaccgcccgcgctaaggcgcaggcgcggcaccgccctcctcggcggagcgcgtgtccgacttgagcttcacgaactccttggccacctcgtcgttgctgcgctgcgagaggattcgcagcaccgtgaggcccgtgtcgtccatgtggatgcggcggccgagcggcagccagcaggcggcgctcccgcgctgggccagctcacgcagctgcagcacggccagccccaccgtgcggtcctcgcgcgcgaagcagtagtccttgacgcacacctgcagctcatagcactcgggacccgcgtcggcgctcagcgtgctgcgtggggaggggcggaacgtgagacaggccacacctactgtgatgccccgcccacggccccgtccccaccgcatttgcgggccacgcccacaccggggtgcccacacctgtcacctcccacgctacgctagccccgcccctgccccgttacttgacctacaaccctgtgcttggccgcgcccacagcagctgaccccgagctgggccacgcccacgcctgttcttcccatttttccacccaccgaaaaatgaccgcatagttttacatccagctcccgcccctcagacaccgccctgcaaggccatgctcccaccctgagatacccgcgcctgtgccctctgccggctgaactgctgcccgcacggccctgcccctaatgtcccacccagaagctctttaaccaggctctcctctagacccacgacgtggccctttccccagccccccacacccccagcccacccctcttacttccaagatgccctccagacatgagcctgccctggtgcctcaccatgggtgacaccgcctcccgcatgcccctcacctgtgctcctgcccctaagcagtcccagtgacctgccctgacgccagctggataagagcccctcctacagggtcacgcccagcttctccctcttgtccacctcccaggttgtacctctatccctgaagtactccggcccaccctggctgacatctgacctcccactagaccatgcttctcctcctgagtatcccctaaaggggccaatcgccccaaaaccttctgaccaagagccctgtgctgacacgacatggaactggcttcaatcttgtcccataagagctcccaggccccctagataataccagctaaccagctctgatttacccttacccctgtgcatttttatttatttttatttatttttattttttgagtgggcatctccctctgtcacccaggctggagtgcagtggcacaatcgcggctcactgcaacctctgtctcccgggttcaaacgattcttctgcctcagcctccctagtagctgggattacaggcatgcaccaccacaccgggctgattttttgtgtttttagtacagatgggggtggcgggggggggggtctcaccatgttggccacgctggtctcgaactcctaacctcaggtgatccactgccttggcctcccaaagtgttggaattacaagcgtcagccaccgcgcctggcccatagttttttgtttttttaaagacagggtctcgctatgtcggtcacccaggctggagtgcagtggcacaatcatagctcattgcagccttaaactcctgagctcaagcgatcttcctgccccagcctcccaggtagctgggactactttcttctgcacttctgtctcctaagaacatccaacaacattgccctgccccagtgctctgtgaggctgacactcgacccaaggatctaccccggatgaccccaactctacccttgctaaccaccaccatccatctacccccgtgaacagactttttttttttttttttttttgaggcagagtcttgctctgtcgcccaggctggagtgccgtggtacaatcatggctcactgcaacctgtgcctcctgggttcaagcgattctcgtacccctcaccctctggagtagctgggattacaagcgcctgccaccacacccggctaatttctgtattttttatttttttgagtctcactctgtagcccaggctggactgcagtagcgccatcttgggtcattgcagcctccacctcctgggttcaagcgattctcctgtctcagcctcccgcgtagctgggattacaggcgcccaccacaacacacagctaatattttttgtatatactatattatatacaatatataatatatgaaatatataatatatatacttttatatataatataatatatactatatataattttatttatactatataatatatactatatataattttatatataatataaatatatattatatatgtatataaatatatatatatttatatataatatataaaaatatatttatatgatatatatttattatatattatataatataatataaatacatattttatatataattatataatataaatacatattttatatataattatataatatatatttcttttagacggagtcttgctctgttgcccaggctggagtgcagtggtgcgatctcggctcactgcaagctctgcctcccgggttcacgccattctcctgcctcagcctcccgagtagctgggactacaggcgcccgccaccacgcctggctaggttttgtatttttagtagagacggggtttcaccgtgttagccaggatggtctcgatctcctgacctcgtgatctgcccgccttggcctcccaaagtgctgggattacaggtgtgagccaccacacccagccatattttatatttttaatagagatggagtttcaccatgttggccaggctggtctcgaactcctggcctcaagttatctgcccaccttggcctcccaaagtgttgagcttacaggcgtgagccaccatgctcggccagagcagactttttttttttttttgaggtggagtttcgcttttgttgcccaggctggagtgcaatggctcgatcttggctcactgcaccctccgcctcccggactcaagcgattcttctgcctcagcatcccgagtagctgggatcacaggcgtgcgccaccacacccggctaatttttttttttttttttgtatttttagtagagacggggtttcaccatgttggccaggctggtcttgaactcctgacctcaggtgatctgtctgcctcggcgtcccagagtgctgggatgacaggtgtgagccaccacactcggccagagcagacttttttatgctgtccacatcatcagcatcctctagaccctatcctgatacccgcagcctaggcccactcccaactccaagaacctccatccaatgtgaccccacctccaccccacgtgacacccacccccaagcctgggatccatctacactccactcctgtccccagagccgactcctccagatgggctgccccaacggtcctgacaaggctcaatgtagactccagtagtccccacccccatgcaacctcagtcctgtccccaggtccctcagccccccgctcataagcgtcatcactgccaccctcattccttcaccagacagagtctccagccccagcaatggccctgcccaccatgcacttcctgcccagactttccctcccctctgcaagtcttcatcatgaagttaccccactctactcattgcctccccttggatctgccagcccccaaaggtgacctccatcctcgtgtcccctccctgatgtcattcctgcactactaaggggtctccctttccagcacccccacctagaatgtggcccctcccattcccgggcccagattccagatacctcctgcctagctggctttggggttcacctggcggatgccccctcccttgcccccatgctcttcaaagcatcccaaactcacaactggaagctctcattgtacttgggagcccagctattgttcttggatttggtcgcaaacttgcgtttcttgtcgctgagctggggcccaatgatgttgacctcgatgaacggccggaagatgccagaagtctgccacttgaggtcattggcagccaccactgttggaggaagtagagggtaagacaggtcaggttctcccagttggaaaaagtagatgtttgtggctctcaaaacctgcccaaggctgggcgcagtggctcacgcttgtaatcccaccacttcgggaggccaaggcgggtggatcacttgagtccaggagtttgagaccagcctgggcaacatggtgaaaccctgtctctacgaaaaatacaaaaatcagctgggcgtggtggcacgcgcctgtagtcccacatacttgtggggctaaagcaggaggattgcttgagcctgggtggcggcagttgcagtgagctgagattgtgccactgcactccagcctgtgtgacaaagcaagatcctgtctaaaaaaaataaaaaataaaaacaccccacccctcgcccgccgccaaaaaccctgtctgaaataaagactacatttcccagcattgccatgaagctaagtgtggtcatatgactatgttttggccaatgaggtgagagaaaaaaatcacgtgtactacttctccactgtggcttaaaaggcagggagtgaaccccaaactttctccttcctctagccgcagtctgcaatgcttgtgggggctgagctctttgtgaccctatagtggaggaaaaacacatttgggtccaggtatggtggctcacgtctggaatcccagcactttgggaggcccaggtgggaggactgcttgaggccaggagtttgagaccagcctggataccatagtgagacaccatctctacaaaaatataatttaaaaagtagccaggtgtgatgctgcatgcctgcaatcccagcgactccggaagctgaggcaggaggatcgctagagcccaggagtttgaggctgcagtgtgctgtgattgcaccacagcgctccaacctgggcaacagagtgagactctggcctctaaaacaaacaaacaacaacaacaacacattagggatgaaaatgcaacaaaagatggcagcagcacagatcaccaacactgcgaagcctccatatcagctcgaggctggttgctacttaaactgttatcccagagaaaaaccaattctatcatttttgtttgtttgtttacatggagtctcactctgtcacccaggctggagtgcagtggcgcaatctcagctcactgcaaactccacctcccgggttcaagcgatcctcccacctcagcctcctgagtagctgggattacaagcacacgccaccacacccagctactttttgaatttttagtagaaacagggtttcaccatgttggccaggctggtctgaactcctggcctgatccgccagctttggcctcccaaagtgctgggattacaggcatgagccaccgtgcctggcctaattctgtcttatttaagccatgtcaaaaacagcccaatctgtgttctagtcaacaaaagccaagaaaaggaaagcagggctgagagatggagaaagtgggattcagtcttacaaaactgtttacactgctggatccagccatgcctgaaggtggccacctttggacgtttccgtttcatggaccattaaacaacaacaacaaaaaaagggtgttgcttaagccagtttgagtttggtttctgttttagaacctagcaagtccctcccacctcagaccactcacctttcactgtgaccttgtgttccccagttcctggatgagtgaacagctcaacatggacagagacttcacccacagggtcttctacacccaagcctgggcagggcaggggaggatggtcagcgtgagctctgttctttcccacccaccaggagggaccttgacggcctcccacccacctgtgctggcggcaccaggtcatcagccctgatagggaggcactgatggggggccaggatgggaggtgctcttgggaagccaagaatcctgggttctggccttttactgccttgctgtgtgatcttgggtagattgcttaacctctctgagcctaatgcaattcttttcttttttcttattccattgattgccatgttgtcaaaattcagtcttcatgttacattacatcttggcagcatctggcaccctggcctcctgtggctgtttgtcctcttggctgcaacaatgtcaccaactcgattctcatcctacatagttgtcactccctccaacccccttttgtcattttctcctccgtgggtcctcaaactgaccctgcacctcaatatttgacactcttctttgtcttcacttcctccctaggtgcccataaactggaaaatcctgccagctctaccttcaaaatacatccagaagcagagccatgtcttttccctgtatcctacacctgcccccagcatcccatgcctggactattgcagtagcctccttgctggtcttccttccactctttcatctactctcagtataccagccagaaaaatcctattaagtcagatcatgtcggcagggcgcggtggctcacagctgtaatcccagcattttgggagggtgaggcaaactcacttgagctcaggagtttgagactagcctgggcaacatggcaaaaccccatctctacaataaatacaaaaattagtggccatggtggggcgtgcttgtagccccagctactctggtggctgaggtgggaggaacacttgagctcagaagggtccaggctgcagtgagacgagatcgcaccactgcacttcaacctgggtgacagagcaagaccctgtctcagaaaattaaaaaataaataaataacatttaaaagtcagatcatgtccctcctctgctcaaaactcttccatgggtcgggcagtggtggctcatgcctgtaaccccagtactttgggaggctcatgcttgtaatcctagcattttgggaggctgaggtgggcagataacttgaggtcaagagttcaagcccatcctggccaacatggcgaaaccctgtctctactaaaaatacaaaaattagccgggtgtggtagtgcacgcctgtaatcccagctacttgggaagctgagacaggagaatcacttgaacctgggaggcagaggttgcagtgagctgagattgcaccactgcactccagcctgggtgacagagagagaccctgtctcaaaaaaaaaagagagagaaaagaaaattagccaggtgtggtgatgcatgcacctgtagtcccagctatctaggaggctgaggcaggaggatcgcttaatcccagctggttgaggctgcagtgagctatgatcccgccactgcacttcagtctgggtgacagagcaagactgtctcaaaaaacaaaacaaagcaaaaccaaactcttccatggctcccacctcactctgagataatcaaagtggtttttgtgacctgcaacaccccttccaatagtggccctttccaataggttactattacctctccccactcaccccattcttgcccttgttaactctgacccagccccacaggtcacctcattgcatcacctggcccagaatcctcatccctcctgatgtgacagctcatagcggcatcttttattttccttacccctatttcccttctagtgcagaatcttaagtttcttttttttttttttttttttttcttttttttgagatggagtcttgctttgtcgcccaggctggagtgcaatggcgaaatctcggctcactgcaacctcggcctcccaggttcaagcgattctcctgcctcagcctcctgagtagctgggactacaggtgcacaccaccacacccagctaatttttgtagttttgagacggggtttcaccatgttggccaggatggtctcgatctcttgacctggtgatctgcccgcctcggcctcccaaagtgctgggattacaggcatgagccaccgcacctggccttcttttttgtttttgagatagagtcttgctgtgtcaccaggctggagtgtaatggcaccatctcggctcactgcaacctccgcctcccaggttaaagcgattctcctgcctcagcctcctgagtagctgggattacaggcatccaccaacacgcctggctaatttttgttatttttagtagagatggggtttcaccatgttggccaggctggtctcaaactcctgacttcaagtgatccgcccaacttggcctcccaaagtgctgggattacaggcatgcaccaccgcgccaggcctcaacccctaatttttccattatggagtcaaaaagttcccttgtctgcttgaatcatggtgtggtgggcttctgtttggggccaccagccgtgtcctccatggtgccaatggggatcactgatggggcagcttaaaagaatctctcccggtcccgccttctgtgactcaaaagggcatcctgtggggcctgtggacctgtgaccgccagcacctccaccaacccctccccaccccccaccaggcaactccccactcctggaccaccccatgcacggggagaagaaggggaaagtcagaggtgagggtgggaggttgggtcagtcaaacgctgattgggttacctcacgctggacaggaagtgactgagggttggggagcacaggggcctggagacccccatcaccccagtactggggtatgtggccccggtctttgctgcacgccccaggccgtcttccttgttgcctcaggctcccattccacccccaccccccgccaccagtcacatgctcagccgccccgccctcccccaggccgatgcttcatagcaagctcaatccgggccagactggggtgccgggggtgccagggggaattggacagtggtgggtcaggtgaggggtcagaccaaggccaaagctagtaagaaggggggagggaggcagtgctgggtgcccccatcccgtgctttgctggcttcgcggggaagggtctttcctgggcctctcagtgcttcttccaaccccactccccactccccaagtcccgggacccctgcaggggaaggttcctcggacaagtggttgaatctcctttggctctcagtatctcatctgtggaatgatgtacccctcgtggggcagttaaagaaatctgtttcagtttccccaagaaggctaggcatggaggctcatgcctgtaatcccagcactttgggaggccaaggtgggaggatcatttgaggccaggagttcgagaccagcctgggcaacatagcccaggaggtggcggctgcagtgacctgagatttcgccattgcactccagcctgggtgacagcgtctgcctcaaattaaaaacaaaatggccaggcgctgggattacacctgtcatcctagcactttggaaggccgaggccaagatgggtggaccacttgaggccaagagttcaagaccagcctggccaacatggcaaaaccccgtctctactaaaaatacaaaaattagccaggcgtggtggtgcgggcctgtaatcccagctactcaggaggctgaggcacaagaatcgcttgaaaccaggaggcggacggaggttgcagtgagctgagatttccccactgcattccagcctgggtgacagagtgagactctgtctcaaacaacaacaacaaaaccaaacacagattcttcaagaaatgcctggcacaaggtcctgctcagccttagagcctgataagtattcactgagatcagcctgggcaacaaagtgaggccacctctctacaaaaaaaattaaaaattagctagccatgtgacgtgtgcctgtagtcccagctcctcgggaggctggggcaggaggatcacttgagcacaggagggaggctgcagtgagcagtgattgcaccactgcattccagcctaggtgacagaaggagaccttgtctctaaataataatatcaataacaataatcctatgaagtagggtccttgactgtccccattttacagatgagaaaactgaggctcagggagacagattcttgcccaaggtgcctacccgtggagtggctgggctggaatcagagcccagctcttaacctgacaggtgcctgtcccggggtcccaggatctggcttaaaaaatatgtcatatcaggagaaatggattctgggattcccactggaatcgcttcttccccatgtagaaccagcaaatcgtccttccccctcacccgcctgggccctccaagccgctcaggcctgggcggcggccctgcaggcccttgaggcagaaggacgatccttttactagccggggccaggaggggcgcaggcaccgggcaccaggcgcgggcggcgggcgggaggcggaggcacgtacccttctcaggataaatgtcttcactaagggtaaacctagtaccttttccaccatggactaattgggggtgggggtggaagggggagagaggtgggaagcatggggagcggggagagacgagccagtgagaggtgaggatggaggagtgtgtgtggagggggcaggggaggcgcggagaggggacggcgagtgagagggaggaaaaacaagagagagagaaacgtcagctgcagacagacggagagacagacagcctcctgctccagggacaccagggacactaaaagcagccaggactggaagggaagctgagctcagagacccagcgcccacggagggcccttgggctggctggatcgggggagaagggggccgttggaggccacagggctttgctcccctcgccccaggctgggtgtcgatggcgattctccctccccctcctgagttcaagccgccaaacttcttccccttgtcgggaccaattttgaaaagggggggtccccagggaatcctgccctccatccagccccagctgccgtgtgtgtgcgctcagagagggacaggagaccgaagcaaaatacagagagaaagagagagtttgagaaatgggaactccctctccgtccaccctcccccaccaagtcgaggtccctcccgccctcggagctgtcaatcattccttagccccatgacatcacagaggtccctcctcaggggagttcaaccactctctgggaccatgacgtcaaagttcccacccatggacctgccaatcattccttgaccccttgacatcagaggtcctgcccatcctgagctgtcaatcactcctgaagtctcccagagctgtcaacgattccctggacccatgactgtccaggtccctcaggagctgacaatcattcattggccctgggacaccattgattttcccaggagatgacaatcaccttgtggccctacgacgtcacaggttccacacctaagagtcatcaatcctaccctggtccttgatgtcaaagacattccatcccagagctgttaatcattgtctggccccaggacatcacagattttcccaggggttgacgatcacctccaggcctgtgacgtcagaggccccgcccccatgaacctttgatcgctcattggtccctggacttggtgcagagatgtcaattccgccccatccatgacgtcacaggggagtgagccaatggcagccgttcaggcttggggcggggctgtctccgcggagcgggaaagggtgatgcggtctgggtacccttaccctgggccgattgcgtctgtacaaaggtcttgattagcaggtcggtggcctgcgtgtagagcgacagggcatagcgcaaggattgcaggtccgggctcttctccaggaaggtcttcttgaggcccacgccacccgcgtggaaatattgctggggaggacagggtggggagaggtgaggatggtgggaacctctacccactcatagggctgggtagccctgctgtccccactcccaattcttcccgctactactttctcacctcttcctttgctttgcctagtgaactcctatgcattcctcagaacccacctctcacatgccgtcttccaggaaggcctggcttctcccaccttgggctcgcccagcccccatccttccctctacccttctacacctcaagaaatgcctggcacgaggtcctttacatccttccctctacaccttctcactctttgggctcccccagcccacatccttccctctaccccaagcctaatcctacaaggctgagaatgtctgtatccagcagtcttccccgacctggggctccttaaggctccagcattagccagcccagctctggcacagacaggggaacgagggagtgtccataaattgaacaaattaatgtgggtccgaggcgagcctaagtccatgaccacagcagccacaccctctacatcccccacctgggatggggaggggtagggcctctcaccttgatggtgtccagggccaactcaacaaccgcgcactgctttggggtcaagctcttggcttcttctcgtaccatgtgatcctggatggatggggagaggggccatgtgggtggagtgggctccacctttggaatctgtgtctatgggtctcatccctgttcaacttggaggagctgggctgagggtctatgttttcatcatcccagcacccaatatgtgactggtacacagcaggtgctcaaaaaatattggttgaataaatgacttgccctcttgatcaagctgtacctgaagctgaaccattcacatctttctgacacactggggagcaaatatcttgtgcttcagtgagtagagtttctgtcctttgagcctgtaatgcatgtcatcatcctgggacccctcccccaggatggtggcaacctggaagccacatgagtttggggggcagtccctcacgccataatctatccccactcctcaccttgagtttggacagctgacccagctccttggctgcattgaagatcatctgggttccctgcaggtaacaacatacagctgggtgagggcaggggtgctacagctgacactccagccccagagaccatcttggttcttgcccaaaggctctgggcagggcaataattgtgtcccagggacagaggtctggaattccccaggaagaactgaggaggatgtggtgaccttgtccctgaaaatcccggtcctgtgaggatagtcccccaccctctcagccccacccaggcttgtgtaacaggagaaacagacagggaccagactgtgaggggcagtgggttgggggagcctcagacggtggtgtttgtgggtgtgggcagggtttccagggaaagggagctttgggaacacaataggctaggctgaggttgcagaaaatggctctggtcaaacacttcctcctcctcaaggagcatcccctctgcagggaaatttcccctgtaatctgggaggaatttcagtctgatttttcttttctttttttttttttttgagacagagtctccctctgttgcccaggctggagtgcagtggcatgatcatagctcattgcagcctcaaactcctgggctcaagcaatcctcccgcctccccagtagctgggactacacgtgtgagccaccatatccagctagtttttgaaatttttttcatagagatggggtcttgttgtgttgtccaggctggtcttgaattcctgggctcaatcgatcctcctacctcagcctcccaaagtgctgggattacaggcgtgagccacattgccagccagtctgaccttttaaaggaaaaatcctccctctatacaaacacctccatatccgtcctccaccccacccccaaacagacactagcaagatggtgatgtggtgatggctctgacaagccagatgggcctgggttcaaattgcagtcctgctgtgtggccctgggcaaggcacttaacctctctgagcctcagttttcccatctagatgaggaaaattatatccactttgtggcttagtctggactgaacaagtctttgctcagtgttcgctaattatcacttggtctcaaagtcacgggcaatgctaagggagacggggtcccagcctggaaggcatgtgtctagcctcctctgtcactgctggatggccccaggcttgtccctgaatgctctgagcctcaattcccactgtggctaacagggatacccatggtaacttgggggacagggtggggctgagtattgaggtaacaagtcttgtcttactgggtcctggggtggtctgggggtcctgggtgaggctaggtggggagggggcccatttactgtggaaatatttggaattatgttcatagtctaccagctggccatctggtcattcctagaggtattactattatcatcttggctgttactattcttatttcttgtctgtgatcctgaggttcttacaaggcacagttactcaggggtccagcggactgggcctcagtttcccctgctgcacccacctgtagtctggcagggctcaggggccttcctgggtaccctctgccctacccaccaaccccccacccaccaccccccacgagcaagccagacagacaaaggaagaagagaccaacagacaggttcacagtacgccctcggacggcacgaaccacagaggtggaagggggcacaggggtggggtgggggggagtgggatgggagccagacagacagtgagaggccggtcttacgtctgagtggcttggcaatttcaccctgccctgtggagagaatcaggtggaggtcagagttctggtgactgttgggaggatactcagtgggacttccctgccccctcaaagcacagtctcacttcccagcccaggagctcctccccaggtcctgggtctaatggtgggccccctccccagctagcacctcctctggtcccctagcaggggtttagaggtcagactccttgactgccagcacactctcggggtacccaggaggctggaagcagcctcatcccacagtcagcctgccccaggatggggcacctggggaggtggggagatgagacagggctaggaatctgtctcctcctccattccctaaggggctgcccctatatcccagcacccaagtctacaaaaaacatattaacatatactgtaagttcactcagtgctgaagaacccatacactaaactacatacgtgcactcctaaacacttgcaggcacgtacacaattatatcacacacaaaaacccacacacccttcttgaccccacacggattcacatccacatatagggtgcctgggacactgaatgtgccccgcaaagggctggcagagagagtacggaacccctgtgacccacattcacaaagctaagactccatttgtagacacaaatgtacaacgatatcttctgcacaagtgtacagcaagacagctgcttgcgtgttgctgtagctcccatctccttaacaacaaacacccattagcacagcaacaaaaagaaatctacgtaaaaaacaacacgtctcagtccagggtggtgatctagcgtgtaggctcctcaagaaggcacagaatttcagctgagcccagggctcagatgagccctgtgggtattgctgtgggaggatgggagctgtttgtgcacacacattagttcacatgtggacacacacactgcacgttctgtccctggagaatcacttcatctctgacttctggttttgcaggacttggttaggagagctatctcctacccacgacccccagctgcccttcctgcccaggtgcacagacgcacacacatgcacacacatgcccagacactggagctcagggcctcagtgagacgaggccctcattaccttttctaatcccttgccatgttttctcaagaggttcccctgcagagataatgtcacagggtgatcaacctggcaagtcgtgcagggtgggaagctgggatgctcacaggaatattcatggggatgggggaatccacactgcacagggtactggtgactgggttgcatggggatagtgtgtttgtgtgtgtgtctgtgtgtgtgcacacacgtgcatgcgctttagtgactcactcttaaatggtgtgagaggcagagacaggaaagagagagaaagatacagatacagagctaaagaaagtcagaaagaagggaaaaaagccactgccaaaatataatccatttacatttactgtacacatgagactcttggttcttgggttaacaggaaagcaaatgggctgcatattcagacagatctgaatttgaatcctgattctggcatatatttactatatgaccttgaacaagtgactcctctctgagcctcagctttcctcatctgcaaaatggggataataatatccacctcactcaaagggttatcatgaaggtgagctgaaacaggagctatgagaaggcctggcatatggggagtcattaaatgcgaattcctttattccccctgcctacaaatgcattgcctgtggttgggtatgctgccaccaagtggttatagccaaagacccaggctgcagctaccaggaagtaagagcccttgtaaacttttaacaaagtgaaatcttgtaacagccttgtcttgcccacaaagggaaaatctgaagttgttttgtctctgctcttacacatgtctgcatatcaccaccaccaccaccaccaccaccaccaccattagctctgcctctgggccggtcactgagagtgcagtggcgcgatctcggctcactgcaacctctgcttcctgggttcaggcaatactgagatgagtattttaatgcatcatgccatttggttcttagaactaccctcagggaggtgatgcaatgagccccattttccagacaaggaaacagaggctgggaggtcaagtgacttcccaaggtcacagagagagacagtggctgggctaggatttgaccccaagtctacctgacatcaaagccatgacaaaagtctcccacttgggcacctgggtgtatgtctgggattggtgtgtgtcggtgtggatggcgggagttgggtagacagggtggtggggtaccaaggaatggtctggagcatggaatttcagaggaatcagaagtagagaccctcatggtgaggacctgcattctgggaagctgctgacagttcagagcccaaagaggaggtcagaggaatcctggggttgatcctctttctagcttcagggcgtctggtgacatctgggcacgggagcaaggttggattctacccttagacggcaggtccgctgcgaaggaggagctgggcttggggtttgggagtgggtagtggggctcctctggacttcagtgggacagggagggtgggcgtggtctccctccctcccagccccgccccctccccatgccccgccccagacagacacaggcacatctaggcgggagggaggatggtgggtgaggagggggcgctgggtgggtggggagaggggtgcagcgacgcggtgggccgagtccagacacagagaggacggacagacagacggacagacgggactctacttacgatcatctgtcatccgtgatgggggcggggcggtgggggaggggggaataaggtaccatgagtctcccgggaaggccagggagggggcagagatggcagcacggaggggcaagacccctgccccagcccagcccagaagaggtggaaggatgggaagtccgagcctccccgaccatcgtcgcccatctatggcccccgctcaccctccccaagcctccgtggtccacctgggaaagacctccccactccctaatgtgcccacagcccacatgccattgctgtcctcaggttcttgatgcctcccggagggacccacgcccagctacatccctctacagatgtttgggtccccttggtccctagagattatggcctctggtctatcggtcctggtctctggatggccaatgatctctgcttgacctctctgaccttggatgccctccatgacctctggctgacttccaggagccccttggtctattgatctctgatgtctgaagtccatggtgtctcccctctttggcttttgaatgagccccaaagcccttagaaaaacccattgatgtctatgccttctcttttttttttttgtttttttgagaaagggtctcgttctgttgcccaggctggagtgtgcagtggcgccatctcagctcactgcagcctctacctcttaggttcaaacagttttcgtgcctcagtttcccaagaagccaggatcacaggatcacacccagctaatttttgtatttttagtagagacgagatttcaccatgttgcccaggctggtctcgaactcctgacctcaagcaatctgcccgcctcgagcctcccaaagtgctgggattgcaggcgtgagccacggtgcctggccaatgtctatgccttccgtggctcaaggataaccttgatcccaaaattgacctgttttctagatgacctctgacctttgaaagctattttgacctacatgtgacctctatgactttagtggtctcttgactctacctgatgtctttgaccccagagaaaatacaatggactctgaatgacctctttaactcttcgatgatctttaacccctgtgtgaactctctgacctctgaatggccccccactgacctctggtggcttccatgacccttgaatggcccttgagcctggatgacctctctgagaccggatgcctttgttcttaccccccagcctctaggcaccaagttttctgggctctcgccagggaggtggcctaaatgtcccctcgggccccctgcaggtctcaccgtctggtcagtgaggggcggcaggacgatggttttctccatggtgttcataaccagcttccacagctccttcagcactcgcttcagcacagtcttctcacagattttggcaaagagggtcaggctggggacgaggggcaggtctgagagagggcccagctcgcccccacccacagatcaccttcccttaacaggtgggcaaggcattccacagataggaaagagggcccacagcctgtacagggacccctgggtggtttgatggggctatgatatctgatgcatgaagagaagagtgagtggtggttggactagtcagcagggaccagatgggaaggggccccaatgtctgggaggaaggcttgggttttatcaggatgggggtagtggggagccatggagtgttcaagagggagacacagccagactttcatgtttgaaagaacagtgtgggggatgaaccgaaacaggaaggatggagatcagggactatgagggagaaggccatgcccaagaggaacaggaggggaatggtcagaggagggcagacttgaaagggaaaacagcaaagagattgtggttggatggataggggttgaaggagacaggcagtccaccaagatccatccaccaactgatccagtcacccaccaatccatccctcccccagtggtccttaattctctatttctttttctatccatccatccatccatctgttcatccatccatccttccatgcatccttctacccatccatccacttatccatttatctatccatccacctgtccattcatccatctgtccatccatctatgcatcaaaacatttattcatccatccaaatatttctcacctattaatccatccatccatcgacccactcatccacccacccccccatctgtccaaccatttatgcatcaaaacatttatttatccatccaaatatttatccacctatatctatccagcatccatccatctacccacccacccatccaaccatccattcatccatccacccatctgtccatccatttatgcattaaaacatttattcaatgatctaaatatctattgacctatccatccatccattcatccatccatccatccagccagccagacagacatctatgcatcaatccatctatacatcaaaacatttattcattcatccaaatatttatccacctatctatccatccatctacccacccatccatttattcatccatccacccatctgtccatccatttatgcatcaaaacatttattcatccatccaaatatttatccacatatccaaccatttatccatccatccatccatccatccatccatccatccatccatcgtccatccaaccatccatcaagccagcctgccagacatccatccatctaagcatcaatccatctatgcatcaaaacatttattaatccatccaaatatttacccaactatccacccatccatctttttaaaacatctatcctccctctatccttctaaacatttatcttttaatccatgcgtccacccacctacccatccctcatgtcacctattcatccaccattcattcatccacacaaatatttactcaccaatccttccaattatttacccacccaactttccatccccttcatgccaccatctactcagccatccaactatccagtgaccacccagcaaacattccctgcacaccctctccagccagtccctgggtctctatggccctgccccagcccctccccggccagcccagtccacctggcccagctcacttgctgtccagcaggtccatgatgggctgcaacacattgtccgcgtcctgggccacgctgctgcaggcactggctggcacattgcctgtgcccttaacctggctaaggatgtcacccatctgtttgacacactcttcaatgtgcggctggaagctggggacacagaagggaagggctcagaccacaggaagggctggatgaggacacagatgctgatctgtggtccttgaggtcatatcatttgcatcacagcacataaccgagcaagaatggagaacaggccagatgcggtggctcacgcctttaatccaagcactttgggaggccaaggcgggcggatcacgaggtcaagagatcgagaccaccctggccaacatggtgaaaccctgtctctactaaaaatacaaaaattagctgggtgtggtggcatgcacctgtagtcccagctacttgaacccaggaagtggagggtgcagtgagccgagatcgcgccactgcactccagcctggtgacagaacgagacttcgtctcaaaaaaaaaaaaagagtggaaaatagtaactgcagaaccaggcaaagggataagacatttgcccgcattgttcatttcattctcaaaatcctacccaggtactattattgtcatcaccccaaatttacagagcaataaaaaaaaaaataaggctcagagaagttaagtgactcacccaaggccacacagctagtaagcagtaaagccaagatttgaactcagccttgtctaactctgagcctgcaatcttcacctctacatctgctgagcctccagatgccccaggcttagagggctgaaggctgttccctccccactgcccccagccctggagatgctcccacctggtagcaaacacccggctgagctcatccaagacgttattgagtttcacctgaagctccttcaggatgtcactggcttcagcatccagctaaggagggagaagggacaccaggccaggttcagtaagtatccacatgtactgggcattttctcatctgacccagggaaagggatcccaaggggctgcaggggaaactgaggcacagaccgttatgctgcaagcctgggtttaaggccatggttgagctggaattcatccccaggcctggtggcatatgagctcaggggcctgcagggacacagtggtgggggtgccccatcccttctccagccctgcctcggccctgcctcacctcctttcctcccatggcttcgaacatcttctccagctgaactcgtagctgttgagtgttattcatgagaatgcagggctgtgggtgggaacagagaggggagtcaagcctcaggacctctccccagagcctcccctacccaccgccagggaccttgggatggtttcagggtctgggtctggaggaagctggggtcccatggggtcacctgcaaatggaagggagcttttgtgctcaggttcctgggcgtgttgttggggcgggcatctctggggactggtgggggcaaggaggactcaagtaatcccacgaccccaggcctggtggggggtccatgagaggggctgggaactctgggagtagcagagtttcctgcaagagcccaaagctttgcagctcacaccctgaaggcttcatttgcaacagccagacagtgacacactgaaggcgtgtgccctcaccccgagatatacacacgagaccccccccacagatacacacactcagacatgcacagccagacacagccatagacacacactcacaccacgcacattcaacaccgccataccaaacctggtgagacacacccacccagacgtgcacaaacacacacacacactcacactatatgcagttaactcagccagacaaaacacggtcacacacacccagacatgcacagctggacacacacacaagcatacacacactcacactataaccagttaacacagctagataaaatatgagacacacacctagatgtgttgtatagttgaacacacatactcacacatacatacactcacactatacccggttaacacagatgaaacatggctagatacccacactcagatatgtacagacacacacagatacacacattcatgttatacccagttaacacagccagacgaaacacaatcacacagatacacacactcatgttatacccagttaacacaaccagacgaaacacaatcacacacgcacactcagacgtgcacagttggactcacacacacattcatgccataccctgttaacaaagccagacaaaacatgatcagacacgcacactcagatgtgcacagactcacacacacacacacacgcagagtataccagtcaacacagacaatacacagtcagacacatgcacttacttcccatacactcagacacacacaactagatacactctgatcacacacattcaaacaagcacctctaaacacacagacaatccagtcagatcacacacaggtggacatacatagccccaggtgtcagggccctggggagaagggagtcctggggatgctgaatggggctgaggagggagataggtcaggggccccctcaggtcaccactttctccttctccttggagcagtaggaggcaaagtccttggagatgatgtctgcatactggaggagcacattactgatggtctggggaagacacagagtgtgggtgagaggagaggctggcaccaaggcaggcgccagtcgtcccatcaaggccactagtgagatcagtgatgaacccaaaccctattaggacctaagatgggcctttgggctaggcaaattctccactcaagatgaccatcaagacctagaggagataccgctcgatgaagatgatcattttatgtagacccagctctttttcagagcaaccaagcatcatattaacccagcctcaaccacaagatgacctgatctcaaatcaaaagccaattcctacttgtaattcccaaggtcaacacagcctaatgccaatgaatcaaacctcaaccccaatgatcccaaccctcaaactcaccccaagactcactcaaattgtgcatcaatctcagcactcactccaatctcaattccaaatcaagacccagcacagcctcaaactccaaccaaacagcattgccaactcgcactaatgacctcaattccaaccctgatctcaacccacacctcaactccaaccttaccctacacctcaactccaaccccaatctcaactccaatctcaatttaaaccctaaccccaactccaacctccattcaaacctcaactccaacctcatctcaacctcaacctcaacccaaacttcaactccaacctcaacccaaactccaacttcaatcccaacctcaatgacatcaccaactccaacctcaacctcaaccttagcccatctccaactcagacttcaattccctaaccctgaccctgtcccctagccccaaccctacccactctcccacaccttggcaaagcgcctcatgtagtgccccacgatctgagggtcgggacactcgagtttcttgatgatttcaaagctctggttgagttgggagaaaacatccaccacggagcaggagaatagggcatgctctgaggtctgctggaactgcagggggaaggaggccaagaggaaggaggagatcagcaccagagaatccctagagcccaactctcccactctccacggggagagccagagaccaatttccccggggtgagatggacagagggcgaggtagacttagagtcaactctagaggtggacgcagaagccatggggtgcctggaggtgtccggcttgatggaactcacattttgtagttgatgaatgaacaaaagattttaaaaaccatgagcaagacaaagatggcggacacctaccagagactggcctcatctcaagggcaaatttccacctaaattgaccccagtgggaagattaggaacttggttgtgggtgggccttcttaccccatccttcttgtctcgctccagggcaccgtgcaggaaatcccgggacacctcctcattctcatccagccactggatgacgaagggttcaaaccatctggaatgaagagccggggtggggctctgccacctcttgtcctcctcaacctctgcgccgcctggttctgacccactaacgagtggagctatggctgctcctgctctgcctggagctctccctgcagccttgagtggctgctcctctgctcgcctcctgcactgaacctcagttactttgctcatgaaatagattgagtggccccttttacaacagggcccaggcctgtgggaatcctagttcagataagctgcccatggcaagtgggtttattctctgagtcctctctgagtcctccgtccatccttccctccctccctccctccttccttccttccttccttccttccttcttcagataaactgcccatggcaagtgggtttattctctgagctcttgttttctccctccctccctccctccctcctttccttccttccctccctccctcccttccttccttccttccttcttccttccttccttccttcctgggtcttgttctgttgcccaggctaaagtgcagtggtgcgatcacagctcactgcagccttgacctgctgggttcaagcaatcctcccacctcagcttcccgaatagctggcactacaggcacatgccaccatgcccggctaatttttttttttgtcttctttgtagagacaggatttccctgtgttgcccaggcaggccttgaactcctggcctcaagtgatcctcccaccttggcctcccaaaatgttgggattacaggaatgagccaccgcatccagccagagctttcgtttcttgtacaacagaagactagccatcctcctgtgctgctgggagcagagaacgacaccacaattctcaggaaccggcggcaccgtactatcctccaacacacagcccaggaatcagatgtcccgagttcaaatctcgggtctgtcatgtactgggagtcaccgtgggcaaggaatgtggcatttattcactcattcattttatttttatatttatttattttttgaaatggagtctcactctgtcgcccaggctggagtgcagtgacacgatttccgcttactgcaacctctgcctcctgagttcaagcgatcctcctgcttcggcctcccgagtagctgggactacaggtgtgtgccatcacacccggataatttttttctttgtttttgagacggagtctcactttgttgccccagctggaatccagtggtgcaatctcggctcactgcaacctccgcctcctgggttcaagcaattctcatgcctcagcctcccaagtagctgggattacaggcatctgccaccacacctggctaatttttgtatttttagtagagacagggtctcaccatgttggccaggccggtctcaaactcctgacctctggtgatccacccaccttggcctcccaaagtgctgagattacaggcatgagccactgcgcccggccaatttttgtatttttgtagagctggggtttcgccctattggctatgctggtctcgaactcctgacctcaggtgatctgcccacttcggcctcccaaagtcctgggattacaggcacaagccactgtgcctgacccattcattaattttagagatgggatctgactatcttttccaggctggtctcgaactcctgggctcaagcaagtcctgcctcagtctcccagattgccggggctacaggcatgtgccaccatgcctggccatttggcatctttaactctccaatttctcctccgcaaaataggaattaaaatgatcccaccttaactcatagaattgtcaaaaggataaaatgagaaagtcacatggttcctgttgctgttgactgaattttctgggctgtaggagtcaactgctcaatggctgagagtggagaacactggattcaagccccacccatgcccctgatgcccaggtaaccctaagtaggtcagtcttcctctctggctttccttctagctgtcagtgctacagttctggcttgggttgggcctggggcaggggacttacgcagggtactcaggcacgcggtccttgaaggcgggaagttccgtcacatactcattgtagagccatttcaccttgaagtggaggttcatgtagtcggcactcttgcatagacgatgcttgtcgtgctctggccagggacaaagaggatggcacagctggaagggtctgccaccctctgtctcggcagagaggctgcctactctggccatcactgatttccaactcaggcatgagggtattatagggtgctcacagccttggaggggacacagaggtacagccacctggtgtggccaggctggggaacactggggtgggaaactcaccctccatggcgtacttcatgtcttgggcaaacagattccacatcacttcagcgctgattttacccacattcagctcctggggaaacctggcaaagtcatggaagtataaaactttggcaggcagaaggcagatgggatgggctgctttgtccttccctgccccacagaggagtgtagggtagggtagagggatttgggttcaggttccctcatagccactgctgactgactctgcactaaggctttgtttccctttgagcctccacccactcatccatttgtccctccattcattcattcatccactcatgcaactatccacccatacattcaacaactcatttatctattcctccatccattcatccatccttccatccattcattcacccactcatgcaactgtccacccatccatgtacccatctatctattcatccatccacccattatccacccatccaaccatcccttcatcaattcattcacccactcatgcaactatctatccctccacctacccatctatctattcatccatccacccatccatccatccctctatccattcattcacctacttatgcaactatccacccattcattcacctatccatctatctatttatccatccatccctccatccactcattcactcattcatccaactattcatccatccactcaaccacccatctatctgttcatccatctatccctctacccattcatccaactatccatccatccacctacccatctatctattcatctatccacccatccatccatccatccctctttccattcattcacctaattatgcaactatccacccatccgttcacctatccatctatctattcatctatccatccatccctccatccattcatttgctcattcatccaactattcatccatccactcaaccactcatctacctgttcatccatctatccctccacccattcatccaactgtccatccagccacctacccgtctatctgttcatccatccatccgtccatccttccatcatccacctatttatctgtccttccatccattcattcgcccactcatacaactatccacccacccattaaatgacccatctatctattcatccatccacctatccatccatccctctatccatttatttactcacttatgcagctatccacccatccatttacccatccatctgtccacccatccatccattcctttttttttatttagagacggagtctcactctgtcacccaggctggagtgcagtggtgcgatttcagctcactgcaacctccaccacccgggctcaaatgattctcgtgcctcagcctcccaagtagctgggattacaggcgcgagccactatgcccggctaattttttatatttttagtagagatggggttttgccatgttggccaggctggtctcaaactcctgacctcaggtgatcctcccgcctcggcctcccaaagtgctgggattacaagcgtgagctgccacacctggcccatccgttcctttatccacacagtcatccttctaccaatctatctgtccatctgttatttacttatttatttagagacggagtctcgctctgtcaccccaggctggagtgcagtggcgcaatctcgactcactgcaacctctgcctcctgggttcaagcaattttcctgcctcagtctcccactagctgggattacagacgtgtaccaccacgcccggttaatttttgttttgttttttctgttttttttgagacggagtctcactctgttgcccaggctggagtgcagtggccaatctcggctcactgcaagctccacctcctgggttcacgccattctcctgcctcagcctcccgagtagctgggactacaggcgcccaccaccactcccggctaatttttgtatttttagtagagacaaggtttcaccatgttagccaggatggtctccatctgacctcatgatccgcctgcctcggcctcccaaagtgctgggattacaggggtgagccaccgcgcgtggccaatttttgtatttttagtaaagatagggtttcaccatgttggccaggctggtctcaaactcctgacctcaaatgatccacccaccttggcctcccaaagtgctgggattacaggcgtgagccactgtgcctgaccccatctgtttattaatccatccattcatccacccacccttcaatccatccaaatccctgatcttaattccctaaccaggatatgttaacgccccaaagctagagtcctctctagcactcatctggcagagaaatagaacacagtagctcattcagctaacacagatgaaaattctacagacatataaatccacaaatgaaaactgtgcccatattcatacacaatacacaatattgtatattgtacaatattgtacgttgaattgcattcaatgattttacacatatacaaattaaacccaaaacccactgaccacaacaatatacaaaattacttacatccatacatataagatataatgcaatttaaatgtatgatatgtattagggtagcacatagtaatacttgagcaacactattattaattaacctacatacacataaaaaattatacacatatgtacacacagttatgcatgcaaatgaatacatacaaaatacatgtctgattataccagtgattgtgaacatacacacaattttatgtttatgtttgcaaattgtacccatatttgaattttgcacaggtataatcagacccacaattacccccaggtgcacatttgtgtaattagacaaaatcatcttgacacacaagacacaaagttgtatacatacacacgatgacacccagataattaactacacagatacacaactcactggttgaggcagggagtgtaggaattcttgtcttcctcaatgatggacactatgagggtaatcagcttggaccagaagtcgaggttcttgatgctgggcccctgttcctctgggagaacttcccccttcttggcctgaaatggacagtggagacctcggttatagggggtccagaggttggtgcctcggtcagtttattactgaagaacaagaggttttagaggaatgcatcccatcatcatgtgtatggttcaggtaagaaatctatatagagaggaattgaactcataaactggcccaaacagagctcatgtcaatgcagcttgataaagcttaagatttttagactccactctaaaagtgaatggaaataaatgaaaccaaatttagttgaacaaacccagctccactaaaccaaatggaaatgaaatgaatgcaaattaagcccacttagcttaacggaagtaagttcttcctctgagttaaatcaatggaactgaacttgggccaatcacactgaatggagtgcaattcaacctaactggattgaattaaactcaaatgaattccgttggattgaacctaatcaacttgtccaagatcaacatcaacccaaatcaaaataatggaaataaatcgactcgaactcaactctacccaagtcaacccaatccgattctacctatctaaacccaactgaacatacgcagggcaattcaacccacctttgttaatcaatggaaatgaatataatcagctgaaattagcccaattcaacccaattcaactgaaatcaattgcatctaatccaacaacccagttcatcctaactcaagacaatttaacccagttgagaacaacttgacttgaatgtaaatgaactaaatggaaatgaatgaatttgtactcaataaaactcaatgcaatcaaccaacttgttcttctctctattttttttttttttctttcaagagacagagtctcattctgtcacccaggctggagcgcagtggtgcaatcatggctcaccatagactcgaactcctgggctcaagtgatccttccacctcagcctccaaagtagccaggactacaggtgcgccaccacacctggctaatttttgtatattttgcaaagatagggtctcgctatgttgcccaaactggtctcgagctcctggcctcaagggatcctcctgcctcagcctcctaaagtgctgacattacaggtgtgagccactgagcccagcctggctcactaatttgtcaagaacaattttttttttttttttgagacggagtctcgctctgtcacccaggccggagtgcagtgatgcgatctcagctcactgcaagctctgcctcccaggttcacaccattctcctgcctcagcctcccaagtatctgggactacaggtgcccgccaccacgcccggctaatttttttgtatttttagtagagacggggtttcactgtgttagccaggatggtctcgatctcctgacctcatgatccacccacctcggcctctcaaagtgctgggattacaggcgtgagccactgtgcctggccgtcaagaacaattttaacttaagtcaaccaaatagaaataaatataactaaactgattatggttgaactaaacaatctaatttaatccagttcacctcaactcaattcaaatgagagtgagactgattccaactctagtcaactgaatgtaaaggaacagaatgaaatcaaattgaactgaacacagcttatgtgttatatcctatcagaacctgggtaggggctgcctccagctcccacagcctcctgagatcccactatctcaatactaaccatccctgtttgtaaatttccagtttgtacatctttccctcataataggctataagctccttatagcctaatttaatccagttcacctcaactcaattcaaatgagagtgagactgattccaactctagtcaactgaatgtaaaggaacagaatgaaatcaaattgaactgaacacagcttatgtgttatatcctatcagaacctgggtaggggctgcctccagctcccacagcctcctgagatcccactatctcaatactaaccatccctgtttgtaaatttccagtttgtacatctttccctcataataggctataagctccttacaggtggtggctcatgcctgtaatcccagcactttgggaggctgaggcaggaggatcgcttgagcccaggagatcagcctgggcaacatagtgagatgccatctccacaaaaatacaaaaactagcctgtcatggtggtgcgtgcctatagtcccagctacttgggaggctgaggtgggaggatcacttgagcctgggaggtcgaggctgcagtgagccatgattgcatcactgcactccagcctgggcaacagagcaagaccccatctcaaaataaataaataaattcaattcaactcaacatttactgaacagtgactgtatgccagacataaatttttatgccaggctgggagtggtggctcacgcctataatctcagtactttgggaggccgaggcaggtggatcacctgaggtcaaggagttcgagaccagcctggccaacatggtgaaaccccgtttttactaaaaatacaaaaaattaactaggtgtggtggtgggcacctgtaatcccagctactcgggagtctgaggcaggagaatcatttaaacctgggaggcagaggttgcagtgagctgagatcacaccactgcactccagcctgggaagcaagagtgaaactttatctcaaaaaaaaaaaatttttttttatgccaaactcaactacgcaaccaaatgtactgagtgccgactatattttatctaaacttacagctcatgaactcttctccctaatcctgagatgtgggttaatgaccccattttatagaagaagatactgaggttcagaagagttaaatccctcgggaaggggcagggctgggactgaagcctgtgtctagttggcatcactgttcccttctgacccatctggagtctcaccgggtctgtctggtactcccggctgtacagttcatggcagttattgaagatgtactcgtaggtagaattaaggcaggctttcacacagtcctttaccacctggctggctcggggcgggctctggagttcttgtacctgaagggagggagagaggcataggcggccacagctgtgacaggaggtccccaggaagtgactgcgagtcattttgggtttaaggaaatgaagtggtatgaaaggaaaaggttactgagaaaggctgccactctccaggaggaatgtcacttgtcctgggagctggggatcctagagaaccctccttggagagcaaaggcaactggatcctttcctaccttcatccgaaagaaggtgatgctggtgagaaggtccacagtggatttgaggtcctggagtctctccgggctgctggctgggaagttattctgttgggagcaggaagagatgtggggttatggaagaaggcgtggggaggatgggagactgcttttcagggggatacaaaggctccccggtttcaggctgggggttgattagagcacctcgaagcaactggggatctgcttggatgcaccaagcacattacggcaggtagtgcccatgcaggtgcacacatgctggaggaacacatcgtacatgcgaagatgggtcctcccatgcacacacctgctggtagctttcccctccaggcacacacatgtgcgtggggtgagcaaattctcatgcacacacttcctacccggtacatggagaggtcaatccgcagggagttatgcagctggtccaggagtttcacgaagcgctctttctgaggaggaaggggaggagggaggatggatggaggcaggacatggccgccatagtggctgagcgcctactgtacagtaagtatacctcatccaccaccctcataatgtccatttccattctatggcatttttttttttgttttgagacagagtcttgctctgttgcccaggctggagtgtagtggcgcagtctcagctcactgcaacctccgactcctaggctcaagcaattctcctgcctcagcctcccaagtggctgggactacaggcacaggccaccacacccagctaattttcttttggatttttagaagagacgggttttcaccgtgttggccaggctggtctcgaactcctggcctcaagtgattctccagcctcggcctcccaaagtgctgggattacaggcatgagccactgcgcccgacctccattctatagcattctacagaggaataaatggaggctcagagacgggaagtgactggtggaaagtcacacagcaatcaggtctagactggggacccagaagtcacatcagatctgaccggcataaagttgggctctccctaattctccaatcccagtccccaggactgaccccaaagttggaggcggcgaagcggtcggaggcagacacgttggtggaggcggtggtgtgtgcgtagtaggcattgatgttggcgagcagggtgctcatgacggcaggcacccctgggcacatatacttggaggagaggcaggcaaagtggctggagagagggagcaggaggcactaggccaggggtccagccaggatggaccaagatcccccctagaatgcctccaagatagcatctgtgagtgggtctctgtcacctcctaaaccatcccctgcctgattctgtcctttgggtctccgcatctcctctcccctccatctttatatccatttgagttgctctaattctgcttctttttttctttctttcttttttttttttttttgagatggagtctcactctgtcacccaggctggagtttagtggcgcaatctcggctcactgcaacccctgccccccaggttcaagcaattctcccaccctaacttcccgagtagctgggattacaggcccaagccaccacacctggataacttttgtatttttagtagagatggggtttcaccatgttggccaggctggtcttgtactcctggacctggagtgatccgcccacctcagcctcctaaaatgctgggattacaggcttgagccactgtgcccagcctctatctctgcttctaagtcttccctctcttccatgtcactccaggtgtcaatcacagcgctctcctgatctccaggggaattacggaacccaccaccaccacgcccacttcctctctgggtcttccccctgagaatccctcccaccccagacctgccagtgcccacttggtgacctccctcttgtttcctgcaccccagcctgcagtctcacgtcatggcttggtagatggactcgacgccgtagcgcatggcaaactcgtccacaatctcctgggctgtctcatcgtagtaaaccttccaggcatcgtcacccttggcatctgggatcttcacgaccccattgttctgcacgtcggtcacgaagtggaacaggttctgccaccatgggagagaaagtgtcatggagagtgcaaggggtcgccgggggtcagaggtcccagggtctggggcagcttacatcatccatctgcctgtttattcattaattcattcatctactcttttatccatccacacacccacccatctaactaccccaaatttcacccatccactcttccaacctttcagtaattcaaccacacatccatccatccatccattcatccatcccatacattgatccgcaacttaatccacctacccaatcattcattctttcatacaaccaaccatccatccacccatcaatttatccaaccatccatttttcgtctgtccaccagccactcacaaccatccatctaaatattcagaaattatgaacccaattatcaatacttgcaatagttcaaccacacatccttccattcatccacccacccattcatccatttgtccatctgcctatacatccatccatccatccatccatctacctatctacccatctgactatcaacaaattcacctatctactcaatcttccttctaataactcaaccacacttccatccatcccatccaatacaacttaatctgctcatccaacatttcatctatccacccagtcaatcatctatccagcaatctatctatccactcatcaagttatccatccatcattcatctatactcatccatcatctaacaattacccccaaattcacccatccatacatctatactttcaatagttcaatcatatatccatccatctgtccatccatccatcatccatctagccacgaatctacccaccaactcatccatctatccatccatgtactcacccatctctccatccatccttttatctactcatcactcattcatctgttcaatcattcattcattcaccagcatttattcaacaaactagttcctggggataagagttctttccaggaaacccaggcagctggaagagacatacccagacacaaacggcccaatcctgagtggttagggctggaatagaaggaagaacctgatgatgagtagtgagagtcaacctggaggccaaggtgggcttcccagaggaggtgaccctgaatctggactttgatggatagggaggagttttccaggtaaagggaatggcatggcgggcagtctcagagggccaggagagtgtggatggtgtggccagaaagaggaagagctgggcaggcaggaatggtgagtggaagtggcatgggaggggccgagcaatgaccctcacctcatgcagacaggtgtactggacatggtacggggccaccttctcctcgcctttgatctccacactgatgtggagccggatggcacccgacacggcagatttgtcagttcgcttgtctgcagggcagaaaaagaagacagtgtcagaacttcccactatagcagtgggcaatttttttttttttaagagggagtcttgctcttgtcacccaggctggagtgcagtggcacgatctcagctcactgcaacctccacctcctgggttcaagcgattctcctgtctcagcctcccaactagctggaattacaggtgcctgccaccgtgcccagctaatttttatacttttagtagagacggggtttcaccatgttggccaggctggtctcgaactccttacctcaggtgatccacctacctcagcctcccaaagtgctggaattacaggcgtgagtcaccgcgcccggccagccatgggcaaatttttttttattttatttttttttgagatctgtggtccaggttagagtgcggtggcgcaatcttggctcactgcaatctccacctcctgagttcaagcaattgtcttgcctcagcctcccgagtagctgggattacaggcatgtgccatcacacccacctaattttttatttttagtagagacgaggtttcaccatgttggccaggctggtctcgaactcctgacctcaggtgatccgcccgcctcggcctcccaaggcaatttttaatagatacacgattctgtagtcctcccagacttccggaaactaaggctttggtgtctctcttctgattggctccctaggcttgagtctccctgtttaggctagaattccttaagccctgtctcttccttcaaacaaggatcccagaccttgcttcttcactcagattaagttcctggctatgtgcctccctccttagactagcagccctaggccccacttctttcccagtctgagctcccaggccctgcctcccccatcagatcatgctccccggagactacacatcttagacactgttcctgggtctgtgcctctctcctcagactaggaccccctggtcttgtctcccacctcccccatcagaatgggatatctagatgtcctccaatctaagaggtttccgggctctgctcacctctctcaggctgggtcctttctaccccctcagattaggctcatacaccctgcttcctccattagattggactccccagattctactcaacttccttacacagggttctttgatctgtagcagccatctcagattaggattcccaaacaatacctccctctttagactggattcttttcttgtggtggggggtcggggggacacagagtcttgctctatcgcccaggctggagtgcagtggcatgatcatagctcactgcagcttcaacctcccaggtacaaatgatgcttccacctcagcctcccaagtggctgggactacaggcacgcatcaccacacccagctatttttttttttttaatggagacaaaggccttgttatgttgcccaggctggtctcgaactcctgggctcaagtgaccctcccagctcagccacccaaccaatatgttgggataacaggtgggagccaccatgcccagcctggattccattttttttttctttttcttttgttttttttttttttttttgagacggagtcttcctttgttgcccaggctggagtgcaggggcttgatctcgccatgttggacaatctggtctcaaactcctgacctcaagtgatctgcctgcctcagccgtcccaaactgttgggattataggcgtgagacactgcacccggccatatttgttttttgagaaagggtctcactctgttccctgggctggagtgcagcagtgtgatcacagctcactgcagcctttacctctcaggctcaggggatcctcccaccttagcctccagagtaggtgggaccacaggtgagtgtcaccctgcctagctaatttttgtatcttttatagagatggggtttcactatgttgcccaggctggtcttgaactcctggactcaagtgattggcctgcctcagcctcccatagtgataggattaattacagatgtgagccactgcccggcgcccccagcctggattcttttttttttttttttgagtgggagttttgctctcgttgcctaggctggagtgcagtggcgcagtctcagctcactgcaacctccgcttcctgggttcaagcgattctcctgcctcagcctcccaagtagctgggactacaggcacccaccaccacgcctggctaatttttgtatttttagtggagacggggtttcaccatgttagccaggctggtctcgaactcctgacctcatgtgatctgcctgcctcagcttcccaaagtgctgggattacaggcgtgagccaccatacctggccccagcctggattcttaaagctcaatcttctttcttagatttagttcctaggtctctgtctctcccctcagactaggattcccagttcttgcttcttgcctcccccattagactagaacatggagattctgtccccaccctccctcctaagctgaactaagaggttcctgggctctgctcaccctcctggcctgggtgcttcctgctcccatcaaactgggctcctagaccctgcctcccccatcagattatgctcctcgaccaaactcctcctgagaacacatctctctgctcttcgtgggctccatgctctggctggatccctgggacccgtccccacccgcttcagaacccagcttctctcacccaggttgtaccacacgtccatctcgccgctgagcgtccgcacctcaatgatcgtctgccccaggaaatcgtcagattccctcttgaacctctgtttcacgcgggatttgatgtcgtcatcctcgtcccagacgcgcaccttgatgcggtcggaggaattgtgacattcactgtggcgggaggaggaggcagaggcaggggtcaggcagccagtgtgagtcctgtccttggagccctcttttggctgccccagcaggatgccccacatggggccagggacccagccaggcacttacaagtggaaattctcctcccacaccgggttgaggttcccatagatggtttttgtccgtttcttggtcttcccgacctggacggtgacataggggtcactggatcctgtcttgtcctttgcctgcaagccctgggcgcagaccactggaagacacagagggcatacacaggtgtgcactcaagaagcgaggcatgctggggacagtcactgccacacgctgcaggctgataattgggacacctgcagcatggctggagagcaatggcagggcacgctgggcttgccagagaggttttttgtgtgtttgtttgtttgtttgtttgtttttgagacagagttttgctcgtcacccaggctggagtgcaacctccgcctcccgggttcaagcaattctcctgcctcagcctcccaagtagctgggattacccgcacgtgccaccccatccggccaatcgttttgcatttttagtagagatggggtttcaccatgttggccaggtcggtctcgaattcctgacctcaggtgatccgcctgcctcagcctcagcctcccaaagtgctgggaaggagtccccaaaccatgaaggatgggaaggtgccccagctgccttgcgcatgggtaggacctctctcaggtgtgaactccctgaggtcagacacttacaagaacccattgccccccgagatctcctgctcgttggtgccccctgcagggttccttccctccctgacttaccaccccagctccgtcctggggtcacttcctggataacccacataacctgaaatcctcatcctcaggtctgtttatggggaaacccacatgaggctgggtgtggagaaaagccagtatcctcgcccctaagtggggccacactgagctgcatgctcgacattgtccccagtggccccaggatgggctgacccccttgcccacagcattgtctgctcaacggcatctccttcaggactccttccatccctgtctcaagtccttgcccctcaccaggactttctggggtcactttccagataaaccatgcaccctcaattcctcttcttggagtctcattctggagggcaccatccaagacgcacccagatacagtgccatgaacaggcgtttggaggcacgcatgtccccccatatgcgtgcacacacggagatgagatggaatgcacccgaccgagtgagtgcgcgctgcaaaggagagggaccaggccatgggacagggcatgagacaggtctcagagggtggagaaggaggggccctatggcggcccacgccccctcaccggtgatgctgatcttggcggaccacttggacgtgccgtccagcacgctctgcttgaccgccttcatctgctgcgtgtgcgccgtcttggtcaccgcgaagatctcctggatgagctcgaagatctcgggcttgttgcgctcccggatcttcatgcggtccttgagcaccatgatgatgttctgtgtccggtcctccgccccgtgcttggagctcttctccgcagcccctgaggacgcccgaggccggcgctgaccccagcgcgccctgcatagtggcccctcaccaaggcgagagccccgcccctactcatcaaccggggggactcaggtgtcaccccctgaagccggtttcctacctgctttctgtaccccccacccagacccttcacccttccacctcctctcggagccatgctcctctgagtcgccatgtccctgcgtcctgcccttctctgccccgcaccccttggagtccccactggtttttggagccccacccctctaaggcctcttccctaagccccacccctctgagtccccgccccctctgcgtcccacccctctgaatctccgccccctctctgagtcccacccctctgagtcccgctgcctctctgagccccactcctctgaatcccctcctcgtctctgatctccacccctgcgagtcccctccacattcctgagccccttccatctctcagacccctccctttctcttggtcccacctcctctgagtcccctcccccttccaatccccccctccacagtcctctcgcagtctgaaccccttccctctctgagcccctcttcctctcagagctacccctagctaacccattttatccaggggagctgcctcttctcactaagcctgtcctttgcacaacctagctagtccctgagccctgccccacccctctctgacaccctcacagcttctttccccacccctcgaccccctagcccttccaccagggagtcctgcgcctttaaccccacccctccctttcagcgagtccctcccctgcctcacgacgccccgccccttgccccgccccatggtgccccacccatcgccttgcccttcagcctttccccgccatgcaagccccggggctccccacgccaacccgtggccctgcgctcaggccctgcgctcacgctgcaggcagtcggcgttgagcaggtcctggcacttctcgtggcacttgacaccgcactcggtgcagcgcatgccctgcctcgcgatgccccacagcagcccctcgcactcgtagcagtaggtgggcgtggtggccgtccacacttcgaagttgtgtggcgtcgtgcacgagatggggtagattaaggcttgcagggtcttcttgtaaacgtggtttttctgcagggagggatggggtgcggtttgggggcgcctaacctggcgctgtccctgtcctgccccattccgccccatcactgagcgcggtaaagtcccaggccctcccctgcctccacgctgtcggaatccacgctgccttctgccagtctgtgtcacacacacacccttcctcttcccggggacccacagaggcttggacaattccagaagctcctagcccagtccatccctgacccggggaaaaagaggtgccccacgcaccagctcctcgttgttcaacgtgctggaggccaaggccgaggtgatgcccgctttcctggactggaccagggactggggaggtcacagaagagggagtcgggggggttgacatccatgagatcaccaccaggagagttcacagccacggatggggccagcagccacattttggagccacaaccgcaagttggaaacaggtcaccgacagcatccgggccagacccaacaaagaattaggaggtgacagaggctttgagttagaagggaccctggaaagtgagcagccccgcacccctgactcacagcatccaacacagtgggacatggcaaggttcccccataatccatgaattgggggcctgttagaagatcccagtgggggagtttggggagaagatcccaagaggcccatgtcgccatcactcaccatggcctgaagtgtccacgcagcacatgggggtagaaatcagactacattagtctcagagaatgcctagctggcccccaaccccaggttgaccatgggcagttccacaggttgtgcactgcttatagcaggcctgctctgctcagggagtaaagggcgagggtgcttaccaagtcgctcacgagtgggataggtttcctcttgcggatgtctggcatgctgtcgatgatgatgagaccgccccctgggctgaaagacacagagggacactgagggcccagatgtccctattcctcacatagagccctggggagaacattcaacctcccccaggtgttaaggggttgaattgggtccctcaaaaaaaagatacgctgatgccctaacccccactacctcagaaggtgaccttacttggaaacggggttgtcacagatgtaattagttaagataaggtcatactggagtagggtagacacttaatctaatatgactggtgtccttagaagaagagatacatggggagaaggtggctctgtgacagcagaggcagaaagcgacgtatctacaaaccaatactcgggggccaaggaattcaagcaaactagaagctagaagaggcaggggaggaattctcttctacagatttcagagggagcatggctctaccaatgccttgatttcagacttctggcctccagaactgtgagagaatacattgctgtggttttaagctacccgtctgtggtactttgtgacagcagtcctaagaaatggagacacccggcctcaccctcctcatctgaaaaatggggagatgatgtaattgcccaccttgaatgaaaacgtgaattaaggcaaatctaaataatatactaaaatataaatgaggccaggagtggtggcttacgcctgtaataatcccaacactttgggaggccgaggcgggcggatcacctgaggttaggagttcgagaccagcctgaccaacatggtgaaaccccgtctctactaaaaatacaaaaattagccaggcatggtagtgcatgcctgtagtcccagctactcaggaggttgaagcaggataattgcttgaaccaggaggcagaggttgcagtgagtcgagatcacgccactgcaatccagcctgggtgacagagcgagactctgtatcaaaaataaaataaaatatagatgaaacctttcttggctcattgcaacctctgcctcccaggtttaagcaattctcctgcctcagctccccaagtagctgggattacaggtgcccaccacaacgcctggctaatttttgtatttttagtagaaacaagctttcaccatgttggccaggctggtctcgaactcctgacctcaggcgatccgcccaccttggcctcccaaagtgctgagattacaggcgtgagccaccatgcccagccatctttcgaaacaagatctcactctgtcacccaggctggagtgcagtggcacaatcacggctcactgtagcctccacctcctgggctacagcaatcctcccaccttagcctcctgagtagctgggaccataggtgtacaccgccacacccagcaaattttttttttttttttttttttgagatggagtctcgctctgtcgcccaggctggaatgcaatggtatgatcttggctcactgcaacctctgcctcctgggttcaagcaattctcctatctcagcctcccaagtagctgggattacaggtgcgcaccacgacacctggctaattttctgtatttttcgtagatatggggtttcaccatgttgaccaggctggtctcagactcctgacctcaggtgatcaaccgcctaggcctcccaaagtgctgggattacaggcatgagccactgcacccggcccacacatagctaattaaaaaaaaattcttttgtagagatgggggtctcgctatgttgcccaggctggtcttgaactcctagcctcaagtgattctcctgcctcagcctcccaaatagctgggattacaagcatgcaccaccacacctggctaattttttgtatattttagtagagacgggattttgccatgttggccaggctggtcttgaactcctgacgtcaggcgatccacctgcttcagcctcccaaagtgttgggattacaggcgtgagccaccaagcctggccccgaaaaggttttcactggccagtgagataggtgcctgcagccaatgactccagacaagccctgcagggctattcaacctacaaagctttctgcaggagccaactgaggcttagagactcctaaaccacatcttttctcggcagcctccccttgtctgacaggtttctcccgagagcacatccttcataaatcacgtgcacaggaatccgcatttcaggacccgcatccaaggctctctagctagggtacctgctcatttatttaggagtcccagctgctgtctccctgcctgtttgccaaggacgtacaaggaaggtcactatcgtgctgctattttaaaacctgagcatatttttaaaatatcttgtgcatcctctaacctgaaaatccataacataagaggttagacatgaccacattctccactgaagactaaacaactatctttaattaaagagcccacaactgtagcaataatcaaagagatttaaaaatagaatcaacgcaaaaattttgctccaggattacaaatatatagtgtacatttcccaatagtgtctagttcctcatagtgtctgctttatcttacatttatttatttatttatttgtttgtttatttttgagacagtgtcccgctctgtctcccaggctggagtgcagtggtgcaatctcagctcactacaacctctgcctctcgggttcaagtaattatcttgcctcagcatcccaagtagctgggattacaggcgcctgccagcatgcccagctaatttttgtgtttttagtagagacagggtttcaccatgttggccaggctggtttcgaactcctgacctcaaatgatcctcccgcctcggcctcccaaagtgctaggattacaggcatgagccaccgcaccccgccctgtcttcaaagattactgtcttttgtgtctgcgtatggctgtgtgccttatgaaagtgacgtattttgcccaagctcaatctgtcccctgtctaaatggaacccctcctcctcctctctgggctgaggctcaggcgcaaaccagccttggacttggggttcaaatcttcctcccaccgctcacagtttcattacttacccgcctttgaaccatagggatttagacatctctccttctccccgggcctgcaggacagacagacagatatggtcagtgtggctgtccctcccctccccagagcaggctccacacccacttctgactcccctctgggctgggagtcagatggcctgggtcctagtcctggctgagtgattttaggaagctccgtggctatctctgggccttagtttgtccatctgtaagatgggctgggggagaaagaagctcttctctttcaaccacctcaatggacctcagtctcttcattgattattccctaaaccccctatagtctcacttgttcatctgctctcttgcctcgggctctttccaggagttgtgacttcagcttgtacctcttcccaccttctgcagccaaccagcctctatttatcattcgggtctcagcatagacgtggggtccacagcccctaccttccctccatcttgtaactaaagggttaacatggggggaggggtggccctatgaggaacacaggcagcactcttctgttctgaaatattgagggggtgtttggtttttttttaaagacagggtcttgctatattgcccagactggtcttgaactcctggcctcatgtgatcttcctgcttcagcctcctgagtagctgggaccacacacacaagccaccacactcagctcctgaaataaatatatatatatatattttgtttgtttgtttgtttgagacggagtttcccttttgttgcccaggctggagtgcagtggcgcaatctcagctcactgcaacctccacctcctgggttcaagcgattctcctgcctcagccttcctagtagctgggattacaggtgcccaccaccacacccaattaattttttgtatttttagtagaggtggggtttcactatgttggccaggctggtctcgaactcctgacctcaggtgatccacccacctctgcctcccaaagtgctgggattacaggcgtgagccactgcatccggctctgaaatattttttatttttttcttttagagatgaggtctcactacgttgcccaggctggtctcaaactcctgagtgcaagtgagcctcccgcctcgacctcccaaattgctgggattacaggcatgagctcctgaaatattgttgaaataaatattttggatatcacttctctttttttttttttttttttttttgaaatggagtctcgctctgtcacccaggctggtgtgcagtggcgcgatctcggctcactgccagctccgcttcccgggttcacgccattctcctgcctcagcctcccgagtagctgggactacaggcgcctgcaaccacagccggctaatttttttgtactttcactagagacggggtttcaccatgttagccaggatggtctcgatctcctgacctcgtgatccacccacctcggcctcccaaagtgctgggattacaggcttgagcaaccacgcccggccatcacttctccttaagtgtcatctcctccagggagttttcctgattgccttggattagttttatgcttttcctatgaaacccagagagccttccatgtgtctttttcttgtcatattactagttccatagtttgtttttcttgtatatcacatagttccaatagtagctgctattttttcaatttaatttcttgacctagtggaagttatccaacagccttttcactgtgtcctcttccacctgtctcatttagaaccatatgtatgtactgctgagtcaaaaaatagatttctattttaaaactgttaagaaatttcgtttggtaattttgtggctctgatatttgatggtctaaacctttgggagtctgtttagaatctcctcctgccaatcccactgcagtttggagggtaactctgaagagcaacacagctgtccccagcccagggtgagctgaatgaaggaataaacgaatggcctcaaccctgctgcccatctaaacagtcagcttgcccctgatgctgattgcttcccttgattcctactcccctactgagccggccccagacctttccctaaccctgacaatgacctccaatttggccctaagcactgacccctttgcctaacaccaattctaaccctgacctctgatctttgatggctgaactaaccctgaccttgatccctaaccatgacttcagcccagtttcagccctagttttctctcctccctctagatctagaaaccccaggctgacattgggaaggaggctgggctggggatgtgtggggccagacttggtgcatggtttgggagttagcatagccaggctggtgtggacgggccatggggataccctgggctgtgtgtgtatgtggctaaggaagggtcagagtgggtggggcatcggtgacattgggtgaggccaggctgaatgagggtggggccagggaagggctcgagtggctggggcatgggcacagtgtgggcactgcactgggcatgcccaggctaggcttgggtacgggtggggtgttgggcgtggccaatataggtgtgggtgtggccaaaacatgtgtgggcctgccattgggcgtggcctggctaagtgtggcaggggcatggctgggcgtgtcactcacctcctgcagctgcatccgcaccttgttgaaggcacgcagccagttggccttggccctggacatggagtcctgcccctcctggccttcctcatcctctctcggcctgaaactgaggcagggaacgctatgaggctctgggctggctctccgtgacccctgaacttcccttgaccctccagctgtgcaagtgatgcatagctccccatggtatctctgacccctcagagacattaggacccacgtgagtcccctggcccacctcagtgcccctcaccccttcccacacacccaatgcttctgtgacacttcactgttcctcggcttccttttcaccagcccagcccctctggccccccatttgcccaggatcttgacctctccgaccccagcaaccactaagatcacaaactctaagtctccttcacggccccttgaaccctctttgacctccctactctgccctgtcacctctgatccctttaagaaacccaagagcctgtgacaacttcagccccagcaacttcccaggtccacgctgaccccatcatagccctgctgaccctgtgaccttgtggcagcccctctggccccttggccccgtcctgttacctctcctcgtccttgggtggctcagcctcagggatctgctcagctgcaggcaccttgtcgggcgtggctggcttgggggccaccttggccatgtcgggggcctcggtgggtgccactggggccttgtcctccttccctggggcagctggcgggaggctgatgcgtttgaagtctttgggctcagccacagctacgtcttcacgctgggcatagctgcccaaatcgtcaggcacctcctcctcctcctcctccagctcctcctcatcttcaggcagctcctcctcctccaggaagtcctccaggtcctcctccagctcttcctcatcctggtcccagcgaggcgagtctttgtggtagctgaccgagctgtggcaggagtggtaggagtcccggtcccgctcatcctccatgtcggagccctgcaggctgtgctcgtcagggtcgaagtcctcgctcagctgagagcttccctggctcagctccccggaagaggcatagcggctgctacccgtggggctgtggggatggaacagggttcagggactggggtaccgagtcactgcccacctgagccccagtcacacaggcattgactcatcaccgactgagcacctacgatgtgccaggtcctgctctaggggctggaaaacacagccatgatcagaaaagacaaaaatccccgcttttggccaggtgcggtggctcacgcctgtaatcccagcactttgggaggctgaggtgggcagatcacctgaggtcaggagttcaagaccagcctggccaacatggtgaaaccctgtctctaccaaaaatacaaaaattagctgcgcatggtggcgtatgcctgtaatcccagctactcgggaggctgaggtagaagaatcacttgaacccgggaggtggaggttgcagtgagctgggatcatgccattgcactccagcctgggcaacaagagcgaaattccgtctcaaaaaaaaaaaaaaaaaaaaaaaaattcccacttttgtggcatttgcggtctgtggggaacaggcaattgactgtgctgggaactcagggtcagcgccatcaccacagccccgcagcaggtctcctgtcctccacctggaaaaagtatgggaaatgcatccacttccccgtaccccgggccccaacccaggccagcctctgctgtctctaccagatgctgtctccacagttcctgcttcccttggaagccacagggaattgtaaatccaatcacctccctcccctgctctaaatcctaccatggctccctagtgccttggaataaaatctgtgctagccctgtgtggcccatacgctccaaactccccctgcatacctccctccacttctccccgcctcctccattccggccacgctggccacctcgttgtctctccaacaccataaacctgtgcacttgccgtggtctcttccttgtctgctttatctagcaaactcctacccaccctctggtacccactgaaacatcacttacttgtgcaaatgccccccactgtctggccaggtcaggccctctgttatgtgctgcttatgtgaacccaggatcgtgctcaacgtcaacagcaatatctgtctctgtctaaatacaggcagggggacataggggccaccactcagccctcttctaaccattcacttagtcattcaacgaaccttatcatttcccgattagatacctcctccaatcttagcgcctgagaccctcttccctggccagcctcgaggatgctataggaataaaaaggggttcaagactagcccaggcaatggagcaagacccccatctccacaaaaaataaaaataaattagcttggtgtggcggcctgtgcctgtagtcccagctactggggaggctgaggcaggagaatcgcttgagtctgggtggtggaggttgcagtgagccgaaatggtgccactgcactccagcctgggtgacagagcaagactctgtctaaaaaaaaaagaaaagaaaaaaaaaaagaaaaaaatggttaattcccacaagaaaatgtgaattctgccctcctggatgggtgaattctgcccttctggaactccacctccagctctgtccagccccgtacccctctctccactccaggagacacagcaggacccacatgcatgctgcactccgcagcacctacctgagggcttgtggctcagagaactcctcgtaactgtgcatggagtcactgtaggactcccgggagcccaggggtggtgggcgaacagaatattggtggactgaggcgttgggttgtgacgtagtataatagggcggcgggatgctgttgctcgtttcactgcggtagtcactgtcacgatcatccactgcactgtcggggtcatcgtctggaagagagaggcggtatgggaagagggtgaggaagagagagtgcacatgatgggagccaatacaatttcccagacttacggtgccgctaccgaagaagagaattttttactagtatggataaagaattgtgggtcatgttaatagagatataggcttcagaacaagggaggtgaaaaccctgctttgctttatgtgggtcaaattggacctaaagtctaggggctagggtaggacctacaatgtgaagaaaacagggacagagtagagggcatccttcagctcaaatgtgaagaacaactttgctgaaggtcaggatctctgaaaatgacatgggatttttttccactgagcagttagtttcccataacaggagtcacacagacagtcagggggaagttggaagaagatcaggagttcaaagtggacggaacgctctttaacccttagagatttcctgatatctgagggtgacgaccccagacctgaacttaacaaatatgcaagaaccaagaagatgctgagacatggttctgtctttttcaaaaaggattagattcttagcttggcaaagccaccacacacttggaatctattgctaaaatggaatgtggtagagttgccaaacttcatgtttaataagaactaaaagatattttggtttagtttggtttccttagaaaaaagaacagtttgttttctaaatcctaaaaaaaaaaattccaattctaaaagcaacatgtctgggtggtggcataattggggattgtacattttcttctttattcttttctgtaccttctgaaaaaaaagatttcaataatgcaatctttttaattttttaactaaaaagaatgataaagttatctttattttaaaagtaaagcaaaggccgggcacagtggctcacacctgtaatcccagcactttgggaggcggaggcgggcagattacttgaggccaggagttcaagaccagcctgggcaacataccaagaccctgtctctactaaaaatacaaaaattagccaggtgtggtggcatgtgcctgtaatcccagctccttgggaggctgaggcaggagaatctctggaacccaggaggtggagattgctgtgagccaagatcacacctctgcactccaggggctgggtgacacaagaccctgtctccaaaaaataaaataaaataaaagtaaagtaaaacctagtccatgggccaggcaaagtggctcatgcctgtaatcccagcactttgggaggccaaggcaggaggatcacttgagcccaggagttcaagatcagcctgggcaacatagtaaggccccatctctttaaaaaaatttaaaaattagctgggcgtggtggtgggcgcctgtagtcccagctattcgggagggtatggcaggagcattgctggagcccaggaggtcgaggtagcagtgagctatgattacgcctctgcactgcagtctgggtgtcagaatgagaccctgtatccagaaaaaaagaaaaagtagtccatgaagaaaacatgagaagtacgggtaaggggaagaggatgtaaaaaaatgaaaaaacccccagaccccaaaatctcagagcaatgagtgaaaccttcagacttttgctgtattcatccattcatttagacagggtctctctcacttgggctggagcgcagtggcgcgatcaaaactcactgaaacctcgacctcctgggctcaagagatcctcgcatctcagcctccacagtagctgggaccacaggcacacaccaccacacccagctaattttatttatttattattttgtagagatgggatctccctatattgcccaggctgatcttgaactcctgggctcaagcgatcctcccgcctcagcttcccacagtgctgggattagccgtgagccacctcggccggccagcattctttctatccaattgtccttgaccgggctgagatgtttccagccaaattgcatgaggctgtgcacatgtttacccagtttttttttttcctgacaaattatctgcttatgaagggtaaattactttgagttggattctttttgcttttgcccaggctctgctttctactaagtagctcttgactaaattgcctgcttctggctattttcaaccacttttgttttaacccaacggtctgttttcggttcaattgtctttcctttttgacccaattatctatcagctttagctgcattggtgttttgttttgtttgtttgttggtttttgggttttttttttttttgagacagagtctcgctctgtcacccaggctggagtgcaatggtacgatctcggctcactgcagcctccacctcccaggttcaaatgattctcctgcctcagcctcccgagtagctgggattaaaggcatgcaccaccatgcctggctaatttttgtatttttagtagagatggggtttcgtcacgttggccaggctggtctcgaactcctgacctcaagtgatctgcctacctcggcctcccaaagtgctgggattatggtgtgagctgccacgcctggtctatctttgcttttgaccgtactgttcgtttgtggcaagttggttgttatcgagcttgccctgtctgccaagcattcattttggcaaaattgattttatttatttattttaatctatttattttttagagacagggtctcacactgttgcctaggctaaagtctagtagcacaatcatggctcactgcagtcccaacctcctgggctcaaacaaccctcccacctcagcctcccaaatagctgggactacaggggcgtgccaccacacccggccctttttttttttttttgtagagatggagtcttgctctgttgcccaggctgatttcagactttggagctcaagcgtccctcccgcctcagcctcccaaagtgttggaattacaggtgtgagccagtgtggctggcctaagttgatttttaaccaacttgtttttgataaattgtggtggaccaaagtgtttgtcaacagtttcactggtcctggagttaggtttgtccaccaggatatgaggaaggagtgaaggactccccagttgaaggagagagaaggaggcagatttatcctcaaaatagaggactggccaggcatggtagctcacacctataatcccagcactttgggaggccaaggcgggaggattgcttgaggtcaggagttcaagaccagcctggccaacatggtgaaaccccatctctactaaaaatacaaaaattaaccaggcatagtggcgtgcacctgtaatcccaactactcgggaggctgaggcaagagaactgcttgaacccgggaggtggaggttgcagtgagcagtgatcgcaccactatactccagtctgggtgacagagcaagactccatctcaaaaaaaagaaaaaagaaagaaggaaagaaagaatagaggactggatttctctagaagaggcggggtatgggagaaagggagcaactctttagggcatggatctggtctgtggcctgttaggagctggggcgcacagcaggaggtgggcagcggttgggtgagcgagtgaagtttcatctgtatttacagttgctccccatcactcacattaccgcctgagttccacctcctgtcagatcagcggcagcattagattctcatagaaggccgggcgcagtggctcaaacttgtaatcccagccctttgggaggccaaggcaggtggatcacctgaagtcaggagttcacaaccagcctggccaacatggtgaaaccccatctctactaaaaatacaaaaaattagctgggcatggtggcacgcgcctgtaatcccagctacttgggaggctcaggtacgagaatcacttgaactcggaggcagaggttgcagtgaggcgagattgcgccactgtactccatccagcctgggcaacagagcaagactctgtttcaaaaaaaaaaaaagattctcacgggagcgtgaaccctactgtgaactgtgcatgtgcgggatctaggttgtgtgctccttatgagaatctaatgcctgatgatctgtcactgtcccccatcaccctaagatgggactgtctaattgcaggaaaacaagttcagggctcccactgcttctacatgatgatgagttgtatcattatttcattacatactataatgtaataataataataataaaaataaagtgcacaacaaatgcagtgaacttgaatcatccagaaaccatcccccaaccccagtccataaaaaaattgtcttccatgaaactggtcccttgtgtcaaaaaggttgggaaccgctgttaggtagaaaaacggacatttaattagggccaggtgccatggctcatgcctgtaatcccagcactttgggaggccaaggcaggtggatcacgaggtcaggagatcgagaccctcctggctaacacggtgaaaccccgtctctactaaaaatacaaaaaattagccgggcgtgttggcggacgcctttagtcccagctactcgggaggctgaggcaggagaatggcgtgaaccctggaggcagagcttgcggtgagctgagatcgtgccactgccctccagcctgggtgatagagtgagactccgtctcaaaaaaaaaaaaaaaaaggaaaaggaaaatggacatttaatttagggagggggtggcttgccttattccctgggagagcaaatgaaggtggaaggtgaggtgtgagtgtgggtggacctggggggtgctgaggtccctgtgtgcatctccctgaggtccctggcctgccgttctgttagagaccccgcccacccactaccctctgagtgacactggacacatttccaagtggagaaggaagataggaagaccaaaaggcaggggctacaggagaggaggtgaggttatacggcggagtggggtgcgggggtcacagtgcccagctggagacaagcaggttgttggtctaaatgtccactcctccaggctaaccccccccaccccaccccaatgacggtgcccactccccagcagatggcaggcctcccaagacaggcactaatgaacagggtacaggaaagcttgaaaggggtcttgctgagccctctggcccccacgtgctcgtcacaggctccttgcttccctgtgtggtagtggggaggggccttgggatcaccaaggtgcccaccttcccatgtaactcccagaacatcaatcaggctgagtacttactgtgctgctcaccccagccaaaataattccagttgcctacaaagagaaggggcagaaataataaaagggagcagacagaggggtgggtgtaggaagggggctcccctgctgtcctcactctccccaactgctccccccaccccaaaagtccctcttgtcctgagtaccttccctgagtatcaccttcattgctgacacttgctgtgtctctgctctccaccttgggaggaaggtgggatatccctgtttgtttatttttttcttttctttaattttttttttgaaacacggtctcactctgtcatccagcctggagtagagtggtgcaatcacggcttactgcagcctccaatttccaagctcaagtgatcctcccacctcagcctcctgagtaactgagattacaggcacacaccaccatgttcagctaatgttttggttcttggtggttttctttttgtttttttgtgtggagatggatcttgctatgttggtcaggctggtctcaaacacgtggtctcaagtgaggccgagtagctgggatttacaggcatgagccactgtgcctggctcagttttcaatgagaggaaaggctcagtcaggaagtaacaaagtgggtatttgggcccagggttttctgactatgatgtctagggttagcagtctcccagtctccacccttttcctctcccagctcttggataaggaaagacacactaaattggaaaccctaaggtttgaaacacccctgttgggtggattttatcattctactcattttatgggtgaaactatggggctcagagggatggagtgagcagcccaaagtcacagagcctctgcgcatcagggccagggcgagaaccacctttgcctatcacgtgcagtacctggcacttcagaaaaatgtcctggaccagaatcctggctcctctgaccattggctgctttctctgagaaatagggtgacaaaatactccaagggaggacttgtgggtaaatactgagtggtggtctccacttcccaaaatgaacctgcccctagctctagtccatctgcccaggggctctctgccattgccttcctgcctccactctgcctggccccgcccccattgcaacctctcaatgaccccattcaccaagcgggggtttgtaattccttccaggcagtgatgacccctccctggccagggaagccaaggaactttctcaatatcactccccaagttagtgtggaaacagggtaccccagctggagtatcccaagccctcctcaaccccggttccattaccaccctcctggacacatggtgagggagacacagatacagggagagctgtgagaggggagaaaaggaagatggaaaagcaaatggaaaaggtgccaggcatggtggctcacacctgtaatcccagcactttgggaagctgaggtgggcagatcacatgaggtaaaaaatttgagaccagcctggccaacatggcaaaaccccatctctactaaaaatacaaaaattagctgggcgtggtggcatgtgcctgtaatccccactgctcaagaggctgaggcacaagaatcactcaaatccgggaggcagaggctgcagtgagccaagatagtactattgcagtccagtctgggtgacagagggagactctatctccaagaaaaaaaaaaagagaagaagaaaagaaagtaaatgggaaaggagaaggaggctaaagagtgcagtggggttttggtgtcagcaggtgggagctctgccctgaggctatatgatttgctacttcccctccaccacagagcaatgggaagtcattttaaggagggagacagctcctccatccatgaaaagacctggtctggatgcatctgagtgtccacaaggcccaggaagataaaaaatcttgacaactgcagccttgatggaaataggaagaggaacgtgatcatcatcatcattaacagacaaggtgcagtggaaagggaagcaaagttggagtccctcagacctgggttcaaatcctggctctgccagttgccgggtgtgtggccttgggtaaatcacatctcctcttgggcctcagtttctccatctaagaaaatgggttagtgaaacagccttcgtctgttgtacgtgcgcccattgtacatgtgctggcaggatcttctgcctgtgtctgtctgcaccatctgacgtgggctgctcggggtttgtgctggccccatgaatagtttgtggaatgagttatacgccctcatccaggatctgatgaatggaagtgaagcatctacgaagtgtttttcatgtctctagatgtcccagatccttccaacagccctcagagtgagggggctgtcagatgcgctatttcaaagagagggcccctaaatatcgaagagggacactggcctgcccatgaccacatagcaaggtgggaatcaagcccaagtctcagaactctccttccttccttcctttcttccttcttgtctttcatcaagcccaagtctcagaactcttctctttcctttccttcctttcctttctttccttcccttcctttcttttcttttctcttttcttttctttctttttctttctttctttcctctcctctccttccttcctttctttctttctctctctctctttctctctttctttctctttctttccttccttctttttttgagtcagagtcttgctctgtcacccaggctggagtacagtggcatgatcttggcccactgcagattctgcctcctgggttcaagcaattctcctgcctcagccttctgagtagctgggattacaggcacccaccaccatgcctgttcattttttttgtatttatagtagagatggggttttgccctgttggccaggctggtctcgaactcctgacctcggcttcccaaagtgctgggattacaggggtgagccaccatgcccagcctcagaacgctgatttctaatacactgtaagtggacactgcactctcaggacttgtatctccggactggaggagcctttagacaggacagtcatggggtaggggagggatgaggatttcagctgatacccaaggaagaatcaagaggtacttacagcactggttgctggggacaggcagaggcttgtcttgctcatcttggaacgaatactgaaggggtggaggaaggagaaagggcttctctcagaggggccaaaggccaggggaccaggatagtcctctgttctgtcccatcccgacttccctctacctcccaaattctctccctctctatgagaaggatacagggagtaagagagaaaaggagagaaagacacacacacacacgagagagagagagagagagagagagagagaaagacagagacagagacagagacagaaaaagtaagaaacagagatagaaaaaagactaggggccaggtgcagtgactcacacctgtaatcccagcactttgggaggccgaagcgggcagatcacgaggtcaagagatcgagaccatcctagctaaacggtgaaaccccgtctctactaaaaatacaaaaattagccaggtatggtggcgcatgcctgtagtcccagttacccgggaggccgaggcaggagaatcacttgaacccgggaggtggaggttgcagtgagccaagatcgtgccactgcactccagcctggtgacacagcgagactccgtctcaaaaaagaaaaaaaaaaaaagatgggaacagtagacattggggactccagaagggaggaaggagggagcaggacaagagtgaaaaaactacccgttaggtactgtgtttacaatttgagtaatgccatggaattccagaccttagcatcatgcaatatattcgtgtaacaaacctgcacatgtatccgccaaatgaaaagtaaaattttttattttattattattatcaatattattattttgagacagagccttgctctgttgcccaggctggagtgcagcagcgtgatctcggctcactgcaacttctgcctcccagattcaagtgattctcccacctcagcctcccaaggagctggaatgacaggcgcccgccaccatgcctagctaattttttgtacttttagtagagacggggtttcaccgtgttggccaggctggtctcgaactcctggcctcaaataatctgcccgccacagcctcccaaattgctgggattacaggtgtgagccactaagcctggctaattttttttttttttttttttttttagtagagacggggtttcactgtgttgaccaggctggtcttgaactcctgacctcaggtgatctgcccaccttcgcctctcaaagtgctgggattacaggcgtgagccactgcgcctggcctctgtgtgtttcttgaccccatcattgtctagagactggaccacatgggtcatggatgcagtcaggttacaaagagttagaaacagagatgcagggaaagacaagcttagagagaaacagcatctgtaagtgaaaatcatggggagacagagacagaaacaaggaagaaacagtcccctcccaccccaacactcacttcatcctggtcccgcatagcattgagctgctccagcttcttggcccagtagcgagcctcctcttcaggaatgtctgcaagcagagccctgtctgtgagcctggaagaccctccctgccgctcagcctccatcctccaggcctactgagctccacccgggccctggcttctggggtctttggcaaagcctcagaagtaggggtgggttggtctgcggtctcaggagggtggatggagatgaaggggaggtaccgtggtgcctctgacgcccctcttcccagagctgaatggagaatagttggaggatgacaggagatggttcctagcctttacgagggtggggaagccattgtttttatttaattttttaatttttaaattgttttttgagacggagtctcactctgttgcccaggctggagtgaagtggtacaatctcagttcactgcaacctccacctcctgggttcaagcgattctcctgcctcagcctcccgagtagctgggattacaggtgtgcaccaccatgcccagttaatttttttgtattttgagtagagacagggtttctccatgttggccaggctgctctcaaactcctgacatcaggtgatccatctgcctcggcctctcaaagtgctgggattataggcatgagccaccacgcccagcccattgtttttatttttatttttttagagacagggtctcgctctgtcacccaggctggagtgcagtggcacaatcacaactcactgaagcctcaaactcctgggcttgagccatcctcttgcctcagcctcccaaatagttgggactacagaaacccagcaccatgcctggtgaatttttaactttttcatagagatgggatctcactagatggcccaggctggtctcaaactcctggcctcaaatgatcctccccccttggcctcccaaagtgctgggattacagacatgagaagctatgcctggccagccatgggttcttagaagaatgaggtggagagactcaaggtgcttccaggaaaggaagaggggactatctgttctcagcctctgtctacatgtctctctctgtctctctttgtctctctgtctctgtctgtctctcctcctatccccagttcactgttgcagtctcaggcatcaccaaggaacagccaggatagctcaaccctgaacgccctcggtcgtgaagcacttgcagctcactgggaagctacggggcccaggtcatggcccgcacccagcaggttcacatccctgttctctgcaacccaagaaactctctctcctccggggcgaaggaccctcattctcagcctgaagggtcagctagacctacccaggcctgttcactctcctggaatagctgagtgagtccacaactggggctggggctgggtgaaggtcccgggcccctgtactcacctaagggtagctcaaagcgcgtgtccaggaggatgcggtggaaggtggggtccttggtgccacagatctcactgtctgccatgatgacctgggagtccagcgtcagccactctccagggccctcctgggggttgggggaggaggtgtgtgggtcaggaatctgctggtcactagtccccagggcccctactctcgcatgagacatccccctcacccctaccccaaaaccaaagtcatgtcccctctctatctttccttccgtccttccttccttcccttccttccttccctccctccctccctgcttccttcctttctttctttcccttcctcccttccttcctttattcctttcttttccttccttcctttctctctcttttttcttttcttttcttttttttttttttttgagacagagtctcgctctgtcgcccaggctggagtgcagtggcgcgatctcggctcactgcaagctctgcctcctgggttcacgccattctcctgcctcagcttcccgagtagctgggactacaggcacccgccaccacgcctggctgattttttgtatatttagtagagacggggtttcaccgtgttagccaggatggtctcaatctcctgacctcgtgatccacccatctcggcctcccaaagtgctgggattacaggcatgagccaccatgcccggcctaatttaatttttttgagacagagtctctctatcacccaggctggagtgcagtggcgtgatctcagctcactgcaacctccgcttcccaggctcaagtgattctcctaactcagcctcctgagctgctgggattacaggtacgtgccagcactcctggctaattttttgtatttttgagtagagacggggtttcaccatgttgcccaggctggtctgctgagctcaggcaatccacctgcctcagcctcccaaagtgctgggattacaggtgtgagccaccatgcccagccaaggcttccttttagactcgcttacctagattgttgcaaccatttcgtccctctgcattcattcattcaaaaacaaacactcactggccaggtgcggtgactcacacctgtaatcccagcactttgcgaggccaaggtgggcggatcacttgaggtcaggagttcaagaccagcctggccaacatggcgaaaccccatctctactaaaaatgcaaaaattagttgggtgtggtggcaggcccctgtaatcccagctactcaggaggttgaggcaggagaatcacttaagccagggaggcagaggttgcagtgagccaagattgtgccattgcactccagcctgggtgacagagtgagactccatctcacagtaaaataaaataaaataaaataaaataaaataaaataaaataaaataaaataaaatgacaaaaacgaacaaacaaaaaacagtccccagtccctcctctatgcctggttcatattgggtgatgccagggtccccaagaggcccagccatcatcaccctggctcctgagagcccatagcccttggaaacagggctggacacaggcacccccagccccatgaggtcatagcccagagggaggaaggagggctaaaggatctagagagaagtcagagagggcttcctggaggtgggcacatgggaatttagaaggtgatggaaaggaggacacttgaagctcagggaacacactatgcaaaggttcagagggtggaatctgggaggggtagaggttagagtgtggggggagatgaggctagtgggcaggtgccatctgaagggcctcccaaggcagatggacaggggaggacagatcagagctccagctaataaggccttcctggggtcagcatggagaggttgagacttgaggttaggaggccagggattgggctgtggggacagatgaatagacatgaccacggcctggcatggtggctcgcacctgtaataccagcactttgggaggctgaggtgggtggattgcttgagcccaggagttcgaaaccagcctgggcaacatggcaaaaccctgtctctattaaaaatacaaaaaaaataaggggggcctggtggcatgcacctgcagtcccagctactcaggaggctgaggtgggaggatcacttgagcctgggaagtcgaggctgcagtgggccatgatcatgccaatgcactccagcctgggcaacagagtgagaccctgtctcaaaaataaataattaaataaaaaatagacatcactactacctgctgacaatgatgcacaggctgaggggccagggttgttacctagcaccttcttatgagttggtgtaagcttcctgctgctgcccatctgggacacaaaatgctaattgcctatattatcccttttctccttccaaggtaatacatttttagctgtgcctagggaagcacagcccaggactacattttccagcctaggactacatttcccagaatcccttgcagcaaggtgttggccacatgtctaagttctggccaatgagatgtgcatgaaccacccccctcccccaccaccagcacctttcggtggttggaatgaagatgcaatggtgagcctaaagcagccatttggggccacaaggtggaagccacatggagagagaggcagagcaagatggaaggtgtataggctctagtgactttggaaggttcgtggcaatcccaagtgtctacattgatgttgtcaggggataggagataaatgcccatcttgtttagtccactggtctctgggcttctgcaaggcactcctccttcttcaccctcaggccacccgccactcacctcattggactggcggatggtcctcagtgggatccacacagtgcccaccattgtgtcccagatgagacccttattccacacctccaccgtcagtcccaaatccagacggttaatctcgctgcagaaaaaggagagggggcgtcgagggagcaggagggaggaaacgggggcccagggagtttagttgattcgcctgagaacacacagcatactgcaattcaaacctaggcctgggagtgtcctaggtggtagggtaacatggtggttctcattttatagaggggaaactgaggccagtgggggaagttaagagctcggggtatcacaaaagaaccaggattcaaagccgggaaggatggcgtggggacagatgttacacatcgcctgcaccttcatctttctgagcccttccttgggccctccaacactgaccatgctgggtaagtgaggaagaggctcaaataccctccatagctccctttacctacaggataaggacattcgggtcacctctgtccttcccagtgtcatccccatctaatgatgtgaggacacgatcccacctcaaagcactttccctgcaggcctcgccctagacatatgtgaattcgggggagcaggaaacttggtgaaatgtgagattcactgaatttacagtttaccaaagatttatcttaagaaatatatttttaaaatatggccaaccacggtggctcacgcctgtaatcccagcactttgggaggccgagatgggcggatcacctgaggttgggaatttaagaccagcctgaccaacatggagaaaccccatctccactaaaaatacaaaattagccgggcgtggtggtgcatgtctgtaattccagctactcgggaggctgaggcaggagaattgcttgaacccaggaggcggaggttgcggtgagccgagatcacgccattgcactccagcctgggcaacaaaagcaaaactcagtctcaaaaaaaaaaaaaaaagtatatatatatctgatatatatatctgttggctgggattggtggctcctggctcatgcctataatcccagcactttgggaggccgaggcgggtggatcacctgaggttaaaagttcaagaccagcctggccaacatggtgaaacccggtctttactaaatacacaaaaattagccgggcatggtggcacgcacatgtagtcccagctactcgggaggctaaggcaggagaatagcttgaacccaggaggcagaggttgcagtgagccgagattgcaccactacactccagcctgggccacagagtgaggctctgtctcaaaacaaaacaaaaaaaaaaggaaaaaaattccattggccaggcatggtggctcacatctataatcccagcaccttgggaggctgaggtgggcggatcacctgagtccaggagtttgagactagcctggccaccatagtgaaacaccatctctacttaaaacacaaaaattagccgggtgtggtggcacacgcttgtaatcccagctagttgggaggctgaggcaggaggatcacttgaacctgggaggtggaggttgaagtgagccgagattatgccactgtactccagcctgggcaacagagtgaggctctgcctcaaaacaaacaaacaaacaaacaaaattggtggcaaggcctgggaaggcatgatgccctgaaattgtagcttggaggtagtggtcagggagggcttcactgaggaggtgacacaagctgagacctgaaggagaagagccagctggggacaggagagcaagtgcaagggccctggggcaagaacaagctgggaagtgttggagaaaggggcagaggtgggtgtggctggggcaggtgagggagatagagcgagaacctggtgggaatcacggggaaggctgtgggttttattgtgaggtcgatgagccacggacaagtttggaacatgggagcgacaggatgtgatttgcagttttaaaaatatccccctggctgcctggaggagaacagattgtaggaggtggatggcacaggaggccagggcggaggctggcgggcagcagggacttggctggtggctgcggagaccaagggaagtgattggattggggatgtgttttggaggtgaaggtgataaggtggacaggggaagagggaggacagaggggagtcacccgggattccccagtgtccagctctgccctgaggggccagcgaggtgctgggctatgccagggagtgaggtcatgccagacgctgcagactcacaacatgaaatcctgctcccagctgggctggctgccccgcaccgcgatggtcgtgctcttgacattctgcactttcagggtcacgtacgtgttgaatttctctgtggcagtgagagtaggggtcagcgctggggctcagggactctccaatgccccttcccaagctctagaccatctgctgtgatcccctcaggaatttctgggccactcaccccctaacccacaaccccaccctcagggcacaagggaggggcctcagtgtggggagacgtggaattttgggatacttcatccagctgcttcgaaatgaccatgccattggttttcagctaaaaagactgaggtcccagaaaaggggaacaaaattgactgtaagaaaccccctttgcaggctgggtgcagtggctcgcgcctataatgccagcactttgggaggtcaaggggggaggattgcttgagcccagcagttcaagaccagcctgggcaacttggcaaaaccctatctctactaaaaaatacaaaaaaataattagctgggtgcagtggtgcacgcctgtggtcccagctacttggaaggctgaggtgggaggattgcttgagcctgggaggttgaggctgtagtaaaacatgattgcaccacggcactccagcctcaaaaaataaaaattttaaataaaaataataataataaaaaggcagggcacggtagctcacgcctgcaatcctagcactttgggaggccgaggcgggcggatcatttaaggtcagaagtttgagaccagcctggccaacatggcgaaaccccatctctactaaaaataaaaaaattagccgggcgtggtagagggcgcctgtaatcccagctacttgggaggctgaggcaggagaattgcttgaacccagaggcagaggttgcagtgagccgagatcacgccactgcactccagcctgggcaacagaaggagactctgtctcaaaaaaaaaaaaaaaagaagaagaagaaaagaaagaaactcctttcgcctctctgagcctcatttttcccacctgtagccccatctaagagtccccattctacctcttaggaccctgggaagagccactggctcagggcaagccccaccccttacagactctccaaggatggctggggagacccggggacccccatacaaactgcagggaccccaggccaatggctgcccctccccctatttaatcttctgacccctctcctgatgctcagaagacataaagcccaactctaagtctgggctgggaccccctcccagtctctccaagagacagacagacagacagacaacacgggacaggacagcaagagaagccacttaccttgggcaccatcaaacttggcttttttgactgtggagagagacagagatagggaagggaggtggggagagatgtggggaggaggaggcagagatacggagagattcagagacacaccaagatggagacataaggagagagacacagaggagagacaggcaaagataaaaagcaaaagagacagatgttaaaaaagaaagatagaagcaatgtcagagacagagacaaggggaggaggagaggtaggaaagaggaggcagggatgagagggagagagagaagccatcagacagatgagcacaggcaaccctagaatggaaggaaatttggaccctgagagcattccctgcccctccctctccctgcatcccctgtccccatcaaactccccaagctcccaactagctgtgcctttacccacaattgaacaagattagaaagaaagagctgggcagatggtgggagaggcctcctacaagaagccctccaggattgccccagaagaagaggggaagttgaggaggtggagaagaagaaggcgaggataaagacaatctctgatgactccaccagccccgacaggtcagcaagacctctcccttgattgtccagctcagtctgcaatgtcaaatgctcccagggtttggggaagcctcaaagaaggctgggtgagttgggacaaagcaacccagagagctggctctcaaaatgcatgtggagggcgaggcacggtggctcacacctataaccccagcactttaggtggctgaagcaggtggatcacctgaggtcaggagttcaagaccagcctggccaacatggtgaatccttgtctctactaaaaatacaaaaatttgccaggtgtggtggcaggcgcctatagtctcagctacttgggaggctgaggtaggagaatcacttgaacccaggaggcagagattgcagtgagccaagatcatgccactgcactccagcctgggcagcagagtgagattcttgtctcaacaacaaccaaaagtaatgtacagggagacacttgggtcctggctggagggttgacagagattgtccagccccacctgcttgtgggaggtgtaacctgaatatatgtcaggcaccccactgaggtccagtcttctcacatttcacataatctcacagccccaagagattcaaagccatgtcgccccctcctggctcttctcaacaggtattcagtttccattgccaacacctctcacaccttgcttttgtcccccacatctttttcctccattaattctctactcccacccccaatcttctcccacactgagctcttccctccctttcctttctttcttttctttttttttttctttttttttttagggacggagtcttgctctattgcccaggctggagtgcagtggtgccatctcagctcaccgcaacttctacctcccagattcaagcaattctcctgcctcagcttcccaagtagctgggactacaggcgtgcgccaccatgcccagctaatttttgtattttttagtagagacagggtttcagtatatgtcggccaggctggtctcaaactcctgatctcaggtgatccatccgccttggcctcccaaggtgctgggatgacaggtgtgagctgccacaccggccccttttctttcctccctcttttcttctccccttttccttttcaaattagtgtctttgtttgtgtaggcaatgcatgcacatgttgtaaaatccaaaacaaccaaaagatgaggcactgagaataaagctctttccatcccagcccttcatctccctcccaaatgcaatcaacgttggcagttccttgttccactggagatggtccatgcgtcggcaaccatacccacgttcgttttgcttgatttccaagacaaatggtagcattcgacacccactgttctaatccttcatgttttttcagtatgtcttgaagagcgtgtactagcgagttgaaggataaattcctagaaacagaattgtgtttctatgggcagatgtcacagcctcccatcccgggtttgtatctctgtcctcatcgcttgaatttctgtctcacaaaaggcacctgagtggagccagtgaagagagaattcccgtgaagagcgggggaagtgcgatggccctaaacacatgtcagtaaagactgttcctggccaggcgcggtggctcatgcctgtaatcccagcactttgggaggccgaggcaggtggatcacttgacgtcaggagttcgagaccagcctgaacaacatggggaaacctcgtctctcctaaaataacaaaaattagccgggtgtggtggcacgcacctctaatcccagctactcgggaggctgaggcaggagaatccctttaacctggaaggcagaggttgcagtgagctgagattgtgccactgcactgcagcccttgggtgggccttgagagaagtgaatgctggtttgagccaggttcagattcctgagctgtgtgaccctgggcaagtgaacccctctctctgggccttcatctctgcttccatctctgtcttttttttttctaggtctggtttgttcgctcacatcctcagccccacccagcccccagggagcgcacccacccagcacctcacccctgggactgaaagaggctcaggaacactcaggaatgtgcccagcaggagctttgggcctggctcctggaggaggtccagcctgcaggcgtggggactctctgtgaagggggtgggcaggggaaggggcaagaggtagaatgtgacgggatcgggggtggaggggatgctgacagaggctgagaaaggcacccacagctggagggactcatacagggagaggaagggagaggagagaggaagaaatgatgggcatgaaagcaagagaggagagtctggacagatggagagaaatagagagacacaaggagacagcgagagtaccaggcatagaggcacatgcctgtaatcccagctactaggaaggctaaggcaggaggatcccttgagcccaggagttcaagaccagcctgggcaatgtagtaagatcccatgtctaaaaataataatttaaaagggagagaggctgggcgtggtagcccacatctgtaatcccagcactttgaggccgaggcaggtggatcacatgaggtcaggagttcgagaccagcctgggcaacatggtaaaaccccatctctattaaaaatacaaaaattagccgggcatgatggtgcacgcctgtagtcccagctactcgggaggctgaggcaggagaatcgcttgaacccaggaggcggaggttgcagtgagccaagatcacgccattgcactccagcctgggcgacagagcaagactctgtctcaaaaaatatataataataataataataataaaagagagagggggaaagatttccactagggagggcaggcaggtggaggagacactggggagaggagaggcagttgggggagaaaagtagggatgcatatgggggtgggaaagtgacaggctctggggggtgatacaaggggctcactggggtctagactgggctgggctcacttgaagctcctccaactgtgccctgttttataaaccatggatttaggctcagcggggagcccagtagctccttgatctgttctctctctctctttcccaatccctgtctctcatctccctcctccccgttctatttctctccactctggtcgtcttcttttggtctctgttctctccttctctctctcactgtctctgcccttcttgtgcccctcccttggtcagtccggctcctcttccctaagcctcagctccttcctgcagcctctcttggctagaggggaatggtctccgttggggtcctcaggcagtgggggaccggctggagggctgtaccctctgatagctgaagccaggctcctgcacttagctccctgccgaggtccaggttgaggacatccatgatttttcatcactggggctcccagtgggagaggggtctcagagggaaaaggggacaggaaagggggccgagagtggcgagggggttctcaggagggaagggtgttcgcggtgagggaggggattcgggaagggggatgggcgcagaggggagggtggtatcgggggagaggcttggaggaggaagggggctcagagaaggaacccagtctctctccctgtcttccccggtcagtaaatggtccctgagtcaccgtcttcgtcgtcacatcccgccacctccccgcctgcgccgggttgctgtatcagggtcagcggggcggaagcgccacccttccccagcgggcttcgggtcacacgcatgaggctatttatagcgtgggcgcgcggagggcgtgggaggcgcgccggcggacaggggggcggggatgaggggggtgcccactgctgtccccagcgacgagcgggtgaagacaccgcgtcatgcggcctcaaaggtctttggggcccccagaagcgctgactgatgaatgtagtggccgtacccggggaggctgaggcaggagttcaggctgcgggacacccctgcagcctggcttcgcgcctccgtttctgcatctggaaaatggggagacggagtggctgatctcccttccctctcctttctcctcctcttcttccctcctcttcctccctcaccccttctgcagaatgattatagtgtcatttatactattattattattactgatatctttactgtttttattatttggttgtgttctaaaggtgtccctggcctggattctaggatttgaataccctggattcttttctttttctttcttttctcttcttcttcttctttttttttcttttcttttctttttttttttttttttttttttgacagggtctctctctgttgcccaggctccaggctggagggcagtggtgtgatcatggctcactgcagcctcgatctcccaggttcaagcgatcctccccactcagcctctcgagtagctgagactgcaggtgcgcatcaccatgcttggctattcctttttttttttttttttttttgtagagatggggtcttgctatgttgctatggctggcttcaaggctcaagccatcccctcggcctcccaaagtgttggaattacaggcgtgaaccacatggctgactgaccctggattctaattaggggggactgcagtcttggggcactggctccctgacctgccacgtgggatggggtggggagacaggaggtggagatccagccgtctagggcttctgaaagcccacccgccccaggattagcttgggggaagggaggaagcatagagaatccagaaatagattataggagatttgatcgttttgtgtgtgatgttggtggagggcatttcagcgggagatggatgggctttaggataaaagacctcagctgtgctggtttcgcatctgggagacactaaatgaggacccttatcctccgttgacacaaatagaccagagccagactgagccttcagtgtaaaaaacaccaagaacctggagttccagagagcttcgggaataagggatttgtgtgtgtgttgtttaccatgaaccacttagaagtaggcctagcctatagtaggtgctcattaaatagtaattcacggaaggaatgacgtcacctcctccattaatcctgggaggctgagctaagagctgtcccccagaggcgcgggcaggcgctgtccacggtgctgaatgctcggtcccacccgtgtaccctcaacgaactaggctccctcctggagtggccctgggggacccctcttggagcgctcctcgggccccagaatgcagtggactctcagaaatgtcctgcactcagaaccgccttccagaaagcttttagtctccattaataaaaacatcatcattgatttttttttttttttttttttgacggagtctcactctgtagcccaagctggagtgcagtggcgcgacctcggctcactgcaacctccgccttcggggcttaagcgattctcgtgcctcagccccctgagtagctgggactacaggcgcgcgccaccatacccagctaatttttttgtattttagtaaagacagggtttcaccatgttgcccagggtggtcttgaactcctgagctcaggagatctgcccgcctaggcctcccaaagtgctgggattacaggcgtgagccaccggggccggcccatcattgatttttcatgtcttttgctcacgattattgggccttcccgtaggccaggagtcatgccaggggctctgcaagcctcattagagagttctggcaaacgtagatggtggatgctactcctgtgcccattccacagatgagcacaccaaggaatgcagaggatgtgagacttgccaggaagtggtggacttagcaattcacactcaggcctgctggacccaggatgcccttattggcaccttgcagaagaggtccattgtatgtggaagaaaagtgaggccaggttagggaaagggttaggctgcagccctgaagatgcaactctggagggcatcccatgagaacggtaggagctaagacctagatgcagctcctcctagctggagggtatcagggactgagtagccaggaacggagggatgtgtgaaggcttcttaggcaaggagcaggggaatagccccgatgaatggagagattgtgacatgtctgtttactagatgcatgagagaagaaagcaatcctggctgggcacagtggctcatgcctgtaatcccagcactttgggaggccaaagcaggtagatcacttggtggtcaggagttcgaggccagcctggctagcatggtgaaaccccatctccactaaaaatacaaaaaattagctgggcatgatggtgtgcatctgtaatctcagctactcaggaggctgaggcaggagaattgcttgaacccgggaggaggaggttacagtgaactgaaattgtgccactgcactccagcttgggcaacagagccagactctgtctccaataaataaataaatagaaagaagaaggcaatcccagggcagaacatcactccacagaagggacttggctgtctccgaggtcctggggtctgagagaaggctcaaacttctgccaaccccagtaggctctagagtcagtcagctccacctctggctctgttccaccaggcaagttgttaaagctccctgagcctcagttttcctcatctgtacaatggggctactgtaagagttaaagagggcatgggcataaaaatccttaacatcatgcctatgaaatgctgggctgggcacggtggctcgagcctgtaatctcagtacattgggaggccgaggcaagaggatcacttgaagtcaggagttcaagaccagcctggccactagagatgtatttgtatttttagtagagatgagaaaccccatctctactaaaaatacaaaaactagctaggtgtggtagcacgtgcctgtaatcccagctactcgggaggctgaggcaggaaaatcgcttgaacttggaaggtggaggtttcagtgaaccgagatcacaccactacactgcagtccgggtgacagagtgagaccgtgtctcaaaaaacaaacaaacaaacaaaaaagctggataaatggggtttgttgttgatattattgtaagttgtgaagcaaacccaccctcacctaaattcactgatttgttcatgtcatttattcataacatgtttatagagcctttaaaacatcagttgggcgtggtggctcacacctgtaatcctagcactttgggaggctgaggagggtgaatcacttgagcccaggagttcaagaccagcctgggcagcagggcaaaaccctgcttctgcaaaaaattaaaaagaaaaaagtcagccgggtgtggtggtgcatgcctatactcccagctacttgggaggctgaggcaggaggatcacttgagccctggaggtcaaggctgcagcaagctgagatcatgccactgcactgcagcctgagtaacaggctttgagtgagactctgtctcaaaacaaaacaaaacatcaagtggcctgtgcaaaatgctgtgaggcacataggaagatctggaagtaacccttcacaccaccatgcttttgctcatgctgttccctccacccagagcaccatctccctcctgctcatctccccctcatcacatcttctgagactcaagtaaatggtggtggtggaatcagggtaggcttcccagaggaagagagccctggataccccactcctcagctcccttagccctccctcatctctttcattctaaccccatgggacgtgcaggagtgatggctaggaatagggctgggtcccagagccaggaacagtgcctggtatacagtaggtgctcaattaatgcttgttgcataaataaaataagtgacttcatgaaggaaccaggtggcatttaccattcacagcctcaggatcctgccaagacctagtcagtggattacgatgttgggaagcagcggggcaccacatgaataaataaatgaagcgggcagagataaggcccatacaccatacagggtggtctgctatgtgttggtgctgggtgtatacacaagagcttgcatttgcctgtacttgcttgggtatttgcagcagtagttggctcatcttaccagggcaggcaggtgcctgcctctacatggatatgagtgtgcatgtgtgcagagtatgtgcaccatttaagtgcaggtgggagtctgcacatgtgtgtctaggagtggggtgtcactacatcagagacacactggtgtgtgtgagcttgtgggtgatatgttaggtggaaaacacacatattgatgtttgcatgtgtacatggatgcagttctgtggcagctgtatttgtttatctgcatacatgtatgcacttgtgtgcaatgaaatactcaaatgtgtatttacttgtatgcatcatcatccacttgttgaaaggggctgctttgaatgtccaggcaagtgttgtcatgtgcatacacacatggctttgacatgtgcttatatgaatatatatgtgcttcatggggttggggaccttaacagatatgtatgggtacatgtctgagtgttaggacatgagtgaatctttttttttgagacagagtctcactgtgttgcccaggctggagtacagtggcaggatctcagctcactgcaacctccacctcccctattcaagtgattctccttcctcagcctcccgagtagctgagactacaggtgcgcgccaccacacctggctaattttttttattttttagcagtgacaaagtttcaccatgttggccaggctggtcttgaactcctgacctcaagtgatctgcccaccttggcctcccaaagtcaaagtgatgagattacaggcctgagccaccgcgctcggctggacatgggtggatctttatgtgacatgtatattgtgagcattcatcagacacgtggatacatctatatgcgtgctggcagacacacacactcacacgtgtgttgctgggactatatctgtagcggcagactgtgtcctatatacacgtgtatgcttgtgttcacacaggcatttgagtacacacgtgtgcctacggaatgtgccttcccaggcacatggtctgcgtagagccttcatacatcctaagcatttgtgtccacacaggaacaagtctgggtatgaatgtgtgtagggattggcaaacgcctgtgggtccccggtggaggggaggggggacaggtatttcctcagctgagctcaggcaacacggcaacccatctcagcctagcttcactcctgccaagcccaccccaacatctctcgtgctcagccatcccagcccctcccctctctgggcaccatcccacctctccctgggagactggcctcacccagcacttctccctctccccacccctccctgcctcctactcctcctcactccaacctcacacctccctttacacctgagggccttacctcccacccctgtcaacctcttccccagccttgcccctcccagcgattcctctccactcagccgggcccctccctgtaaagtccacagaatccagcacagtcctcccccaacgtctctgtttctggaagcctcatccctcttgcctcctgctgcccccccttaatgccacccccgcagccgagcctcctgtttgcgtcagagttaagggtgagatccccgcccccccccccccccccccactccactaggcaaaccttccagagaagcccaacttggaggatgtgaggcggggtggggcgggatgctggggggagaagagagaggatagaggagtcagccaagaacacccacgtcggaacctcctccagtgccacctttaagagcccggctacttagagcagggggagaggtcagtagggggtctggacattcaagttctcctcccattccgtcctcaggcctaggcggtgggggtcgcctaggggtctccttcacttccctactcccctaactccataggcctggaggctaggggatggaggagttgacctttgactctagggacccttcttccaccacccccagccccgtccagcagaaacgagcttagagaaagtaggcccctgtccctttaagaacacccgcgtccacgccggcccagcccggccggatttgcactcggaagctgccgcggcggggagcgggcgggcggggcagggtttgtgaatgaatcggccgagggggaggggagggaggaggaggggcggcgggggcggttcccggctccccggcctgcccaccctgtgtccaggcagcaggagttcagcacacgcacgcttcctgtcgcccgaggtctcccgaagcctgcagtctcaggcttggcagacacaccccttcccccaccccagccttcttgaaatgggtgggagtgacggggggaccccagtccttaagaaccaggggttcagagctctgtaggcgtggaacggcggtccacatccacccctgccgcccaaggtctcccagagtttgatttctcaaacgggagtgcccagaacgcctgggttcggttgggctggcttccccacgaccccagagccataaaggtgtggggtggggggtcatgcccctcccacgtctccctccctcctccaaccccaacgcagagcgtgggcctgggcgtgggcctctgtgcagatggcgttctggccccaaaatagctccccccccacctcacgtctccctccctccctctctccagtgcaaagtgggtgaggtgaggatgggccaggagggggaccaggagacattgctcttccaagaagtaggctccctgccgagaaggccctgaaacgtgtttgggagaaccggagggggcagggagcgggaagaccttctggacattcctccaaccccctcactcgggaggccaaagagttaactggaaaagcgcccccagacctccagtcacagccctctctggacgctgggaggggtctcctgtctccacactccccccactccagtcctctttacacctagggctgggagagtcctagaactcgtggatgccctgatggccaagcccctctacctatatcttacatccccacggcttggagaaccctcccaccgcactctccttcgaatttccagccgggtccgcgtccatgaggacccgtaacccagcccacaacaccagaccccttccaagcacccctgcaggcttcaatcaaactaccgagcccagactcttcctcactgaccctctaaaaacctggtctacacagacgccccagtctagatcgtttccgggtagaaccccggatacccgtccacgtccacacgggcctccgcgttcagccgcgtccacacgacccctccagcagcggccaccaggacccccgagagccctgccgcgtctacacggatcaccccctccggggcccagctgcgtcgacaagggctacccctctcaaaagtccagccacctggactcgggtcaccccccaggaaccccctgggagccgcatccacgcggaccccgaccccagcccgcgtccacacgggtcccccgacccccagcctcgcctcctacctccaacgcaaagcagagacatgtctccgagctcgcaggtgggccggaggcggccgggccggctctgtcgggtcgggctcagcggccgctgggctggggcatctcccggctgcagcccgcgcttggctcacgccggggcccggccgccaccggccatcttggttcagcaccgggggcgcggacagcgcctgacgtggcgctgatgcggggcgggcaggcggagcccagggacgcctgatggggcgggggcgctgcgggctgggggggcgttaaagggcctggctccgggaaggggcgcctcgccccacacctcctcgttgcagggggacaaggggcgacggcggcccccaagcaggtttcctcctgtgcagaccctcacctgcactgaaatggtgcacgtgcccccgccacccatgcatggacattcctgccctggtaacctgggcaaacgcctccctgcaatactcaagcaagtacaggcaaatgcaagctcttgtgtgtacgcccggcaccagcaccgggcagatggtcctgttctctgagtatctctcttcctctgtctctacgtctctgtctctctaactctactgcctggtctctttctctccctgggtctctgttcctctgactctgtccactgctctctcagtcatgtgtctcttagcctctctctgtaaagtctttttgcagctctactgcatcctgtctaggtctctctctatgtctctaagccatccagcccatgggtccttgcccacactctgaactccttttcatccatcaatgtcttgtctgaatatcctctcctccaggaaggcttccctgactgccccaagctgagcctttgtttctcctctctggactcccccagcccctatcccttcctctgattgggccctgacccgaacgaaactctgccactcctccccacttttcttttttttagatggagtctccctctgcagcccaggctggaatgcagtgacgcaatcttggctcactgcaacctctgcctcctgggatcaagagattctcctgcctcagcctccccgagtagctgggactacaggcgcatgccaccatgcccagctttttttttttattttattttttttatttttagtagagacgaggtttcaccatgttggccagcctggtcttgaacacttgacctcaggggatccgcccatctcggcctcccaaagtgctgggattcagacctgagccactgcgcctggccccctccccacatatcaaactgggcagctccatgtgggccccttgccctgcaacctgctcgctgtatcactggcacctaaactagcatgaaaggctgagccccacagggtctcctgcccccagcccacatgaaagagcttcataaatgcagaatgtgcatggagttgagtgaggccattgttcaaaaccaaactctgtctctcatcacaagcatggccttgggcaggtcttgtgacctcctcgtgcctcagtttccgcacctgtagaatgaatatgataacaagtcctgcctcacaaggttgctggaggtattacatgagttaacatgtgaaaccagttgtaatttttttttttttggaggtgtagtctcaatctgtggcccaggctggagtgcagtggcaccatctcagttcactgcaacctcaacctccaagtgatcttcctgcctcagcctcctgagtagctgggattacaggcgctcgccaccacatccagctaatttttttgtattttttgtagagatggggtttcaccatgttggccaggctggtctcaaactcctgacctcaagtgatccacccaccgtggcctcccaaaatgctgggattacacgaatgagccaccgcgcctggccccagttgtaatcttaatgcctaatagtaaccatgtttgtatctgtcactgctttaaatttttaaaaaaatcagcacagctaatttttgtattttttgtagagacagagtttcaccatgtcgcacaggctgtctcaaactcctgggctcaagtgatcctcccgtctcagcctcccaaaatgttgggattacaggctcatgagccaccatgcctggtcttaaatttttattaaacatcaatgagtagatgttttattaaacattgataatcaataaaacattgatgttttattaaacatcaatgagtagataaactatgaggagcaggcttggataaaaaaaattaccatcgaccgggctcggtggctcacgcctataataccagcactttgggaggctgaggcggggtgatcacaaggtcaggagatcgagaccatcctggctaacacggtaaaacccgtctctactaaaaatacaaaaaattagccgggcgtggtggcgggcgcctgtattcccagctactcaggaggctgaggcaggagaaaggcgtgaatccgggaggcggagcttgcagtgagccgagatcgggccactgtactccagcctgggtgacagagagagactccgtctcaaaaaaaaaaaaaaataccatcacaataaaagacccccatgtgcctctccccaatctcataatccttccctgcagatggaagaactatcacaaattttgtttttcattttcttccttttccttatagtttaccacatgctccttagcaaacaatacatggttacctcttgcatgtttctatttttttgagacaaggtctcattgtgtcacccaggctgtagtacagtggtgtgagctcctgagctcagacaatcctcctgtctcagcctcccaagtacctggaacaacaggcatgcacctccatgcctggctaattagagatgagggtctcactatgttgcccaggcttgtcttgaactctggggttcaaacaatctgcctgccttggactcccaaagtgctgaaattacaggcatgagccacctcatttgactttgttcacattctttactaatctgtttgtttgtttgttttttgaaacagagctgcactctgtcacccaggctggagtgcagtggcacaatctccgctcactgcaatctctgcctcccaggttcaagcgattctcctacctcagcctcccgagtagctgggattacaggcgcccatcaccttgcctggctttttttttttttttttttttttttttttttttgagacagagttttgctcttgttgcccaagctggagtgcaatggcacgatctcagctcaccgcaacctccgcctcccaggttcaagcaattctcctgcctcagcctcctgagtagctgggattacaggcatgtgccaccatgcccagctaatttttttgtaatttttagtagagacggggtttctccatgttggtcaggctggtctcgaactcctgacctcaggtgatctgcccatctcggcctcccaaaatgctgggattacaggcatgagccactatgcctggccatggaggttgcagtgataatttttgtatttttagtagagacagggtttcaccatgttggccaggctggtctcaaactcctgacctcaggtgatccacccacctcagcctcccaaagtgctgggattacaggtgtgagccacagcacctggactgctaatctgttttgtttgctcaatgtgattctgctgatattcatccatatcgctgcatgtggctgtaaggcttgcattttttactgctgcatagtattcctttgtatgaatcttctattggctattcatctgttctccaggtcatggacttttgggttgtttcaagctcaggtttattacaaaaaaaagtttttatgaccatcctcagacttcagacttgtgtgctggcacacatgagtaaggatggctgggtcagaaaatacatatatgtggccagacatggtggttcatgcctgtaatcccagcattttgggaggctgagatgggcagatcatgaggtcaagagatcgagaccatcctggccaacatggtgaaaccctgtctctactaaaaacacacacaaaaatagccaggcattatggcacacccctgtagtcccagctactcaggaggctgaggcaggagaattgcttgaatccaggaggcggaagttgcagtgagccgatatcacgccactgcactctagcctggaaacagagcaagactctgtctcaaaaaaaaaaaaaaaaaaggagggaaagaaagaaaagaaaatacatatatgctcagcttcacctgataatgtcatgttttttattgggagtctggcgattttcatcataccaacacagtataatcatcggttcctctatgttttgtttttgttttgttattggtttttgttttttcttgagatagtctcactctgaggcccaggctggagtgcaatggtgcaatcacagctcactgcagtctccacctcctgggctcaagcgatcctcctgtctcagcttcccaaggagctgggactacaagcctgtgctaccatgcctggctcattttattttttttagatggggtctccctatgttgcccaagctgttctcaaactcctgagctccagtgatcctcctgcctcggcctgccaaagtgctggaattccaggcatgaggtaccgtgcctggctctaagttcttgccaacactttgaattgtccaagttttttcactgggcctatgtggagggagggaaggagtgcctcatttgggttttggtttgctttctgattgctcttgacgttgaactttttatgtgattactggtttctttttatggtgaaatgcctgttcaagtcttttatccatttctttctctttttttttttttttttttttttgagactgaatctctctctatcatctaggcttgagtgcttctactaatgttgacatcttatatattgttacagggtacattttgagatggagtcttgctctgtcgcccaggctggagtgcagtgttgagatctcagctcactgtaacctgtctcgcagattcaagggattgtcctgcctcagcctcccgagtagctgggattacaggtacactctctatcatgcccggctaatttttgtattttttgtagagacagggtttcaccatgttggccaagctggtctccaactcctgacctcaagtgatccacccacctcggcctcccaaagtgctgggattacaggtgtgagccactgcactcggccttttgtccatttcttaaaatttcactgtctttttctattgatttatagttcctatgcatattaggaacaaatcctttgttagtttcatttgttgtaaaaatctccaattttgtagcttgtcttcactgtatttactgtgtcattttctgaacagaagctcttactttttcttttctttttttttgtttgtttgtttgttttaggcaggttctcactctgtcacccaggctggatgcagtggcatgatcacagctcactgcagcctccacctcctgggctcaagccatcctcccacctcagcctccctggtagctgggattacagtcacatgccaccacacccagctaatttttttttttttatcttttgtagagatggagtttcgccatgttgcccaggctgatctgggactactgggctcaagcaatcctcctgcctcagcctcccaaagtgctgggattataggcatgagccacttcactcgacctaaactttttatttgggaaacaaaaattttagacatacagaacagttgctgaggtatagagttgcattttacagtccatcctatatacccttcacccagcttctaataatgttgacatcttatatatggttacagggtacattctgagacggagtcttgctctgttacccaggctggagtgcagtggcgcgatcttggctcactgtaacctctgcctcccaggttcaagggattgtcctgcctcagcctcctgagtagctgggattacaggtatgctctctaccatgcccggctaatttttgtatttttagtagagacagcatttcaccatgttggccaggctggcctcgaactcccagcctcaggtgatctgcctgccttggcctcctaaagtgctgggattacaggtgtgagccaccacatccagcctacttatatatttttaatgcatttagtggtgggggtctcgctatgttgcccaggctggtctcaaactcctagtctcaagcaatcctcccaccacagcctctagcaaaatttaccatttcgaactggataattcagtggcatttcccacattgactgtgttgctatgttgttgtgcattaatcacctctgtccagttccagaacattttcattaccctgaaataaaaccccatcccgattagcaatcactccctttcccccacgcccagccccaggctaccattaacctgcttctcatctctgtggatttaagttattcaacttgctcagtcttttgcagtgtaggacaccatgtctaactcatagcatacttgcttgtttaagaaatcctttcccgggtgggtgcattggcttacacctataatcccagcactctgggaggccaaggcgggaggatcacttgaacccagaagttcaagaccagcccaggcgacatagggagaccccggctctacaaaacatacaaaaattcgccaggagaggtggtgcacacctgtagtcccagctacctgagaggctgaggtgggaggatcaccggagcctgggaggtcgagactgcagtctgcaatgagctgtgattgtgccactgcactcaagcctgggtgatagagtgagaccccgtttaaaaaaaaaaaaaaaaggaaagaaagaaagaaaaagaggccgggtgcggtggctcacgcctgtaatcccagcactttgggaggccgaggcgggtggctcacgaggtcaggagaacaagacaatcctggctaacacggtgaaacccgtctctactaaaaatacaaaaaattagccgggcgtggtggcaggcacctgtagtccaagctacttgggaggctgaggcaggagaatggcatgaacacgggaggcagagcttgcagtgagtggagatcatgctactgcactccagcctgggtgacagagcgagactccatctcaaattaaaaaaaaaaaaaaagagagagagagagaaagaaagagaaaaagaaaagaatagaagagaaggaagggagggagggaggaaggaaggaagggaaagaaagagagagagggagagagggaaagagagagagacagaaagagagacagaaagagaaaaaagagaaagaaagagaaagaaagaaaagaaggaaagagagaaaggaaaggaaagaaacaaagaaaaaggagggagggagggaaggaagggagggagggaggaaggaaggaaggaaggggaaagaaaggaaagaaatcattttctgccccagcgtcataaagatcttcccatacgtattctacattttttgagtcttgtcatttgcagtcatgtcttgacttctcttggaactgatttctgagtgtggagtaagataaagtccaatcgcatattttgtccatggggatgatctattgtcccaataccctgtaatgaaactcacaaagcaagttttcatgcatgtgtggatttaacagcaagcatagaccaaccagaagtcaagcagtgctgctggatgtctgcccacctggaagtctggtctaggatctctcttctgtcccagaggctgatctattcctggtagaagctttgtgctaatcgtttacatctgccaacaccagtcactcatcttgctctgcttcacaagcatctgacttattctttgctttcttctcagctttttgggttgcatggagaaactcagttgggacttagattggaattgcattgaatctataaaccaaatcaggagaatgagcatcttttgtgattgaatctttcaaagtgaacatacagtgaataattccatttatctatctttcagcaaagcttataactttgggatttttttctagatgctttgagtatttggtgctgtggataagtggcctatttatttgggggacagggtctgactctgtcaccctttctggagtgcagtggtgcaatcatacctcattatagccccaacctccctggctcaagtgatcctcttgcctcagccaccccagtagctgggactacaggtttatgtcaccattcttgactaattttttattttttgtagatacggggtctccctatgttgcccaggctggtcttgaacccctgggctcaagcgatcctcttgcctcatctcccaaagtgctgggattacagtcgtaagccactgtgaccagcatctatcaagctttctcaactttttgtaaacccaataattagatgtgcacattctttgggagtttattgcgtatgaggatgttatctgcaaataaagacactcttttttttttctttttcctttttttttttttttttgaggcagggtctcgctctgtcacccaggctggagtacagtggtgcgatcttggctcactgcaacctctgcctcctgggttcaagcaattcttgtgtctcagcctcccacatagctgggattaccctccccaggctcaggtgatcctcccaccttagcctcctgagtagccaggactacaggtacacaccaccatgcccagctaattttttttttttgagatggattctcactctgtcccccaggctggagtgcagtggcgcaatctcggctcattgcaacctccacctccctggttcaagcaattcccctgcctcagcctcccgagtagccgggattagagaagggacaagagtgagtccaggtcaggcaagccaccacgcccagctattttttgtatttttagtagagatggggtttcgtcacattggccaggctggtctcgaactcctggcctcaaggtctcgaacgccttggcctcccaaagtgctgagattacaggcgtgagccaccgtgccaggcctaaagacacccttaattcctcctttccactcctcagaactttcatttcttgttttctttagtaaaatgcgcagcaccatgttaacaggcattcctgccttgttccaattctgaaagagaatgtttcaacgttcatcattgatcatttggatccaattaatttttaagccctggtgcctcatttcattcccaccaacagcatagctcggctgattcgaaaggtattgatttgagctgtctcctcctccctccaattaattatgccatgctgcttctgtcttctcttgccctctcttctctgtggccccctctttttttttttagacacagttttcctcttgtcatccaggctggagtgcagtggcatcatctcagcctgcaacctccgcctcccaggttcaagcgattttcctgccttagcctcccaagtagctgggattacaggcatgagccaccacacctggctaattttgtatttttagtagagacggggtttcaccatcttggccaggctggtctcgaactcctgaccttacgtgatccacctgccttggcctcccaaagtgctgagattacaggcgtgagcctccacacccggccggccccctcttttatttatttatttatttacttatttttgagacagtctttgtcacccagactgaagtgcagtgacaagatctcggctcactgcaacctccatgtggccccctcttaacttcattcccctccaggtgcatctgcatttggagcctttgcaaaccctgtgtgactctctgtgtctttccatctctcttctcttggcttccaatttcatgctttctctccaccaccctaggaaacccacaaagaaaaataatggaaagagaagtgatgggagataatgtacaggctggtgaaaagtacaacccccccacctgcagagtgaggctaccactgccagcaaatgcagacacatcattcctgccttgctgagctccagggcttccccagggaccctgctcttatcaaaacctgcccacccccggtgccaaaagcagcgatgaaaacatctgggctttagatgagaagagtttcacggcacagcatctgtccagctcagcttttgaatggagaatgaatggtaagagctttttttcttctttttgtgagatggtgtctcactctgtcgcccaggctggagtgcagcggcacaatcacggctcactgcagcctcgacctccccaggctcaggtgatcctcccaccttagcctcctgagtagccaggactgcaggtacacaccaccatgcccagctaagtttttttttttttttttgaaatggagtctctgtcgcccgggctggaatgcaatggcgcaatctcggctcattgcaacctccacctctctggttcaagcaattcccctgcctcagcctcccgagtagctgggattacaggcgcacgccaccacacccagctaattttttttgcatttttagtagagaaggggtttcaccatgttggccaggctggtctcaaagtcctgacctcaggcaatgtgcccccttcggcctcccaaagtgctgggattacaggcatgagccaccgcgcccggccccagctaattttttgtacttttgtagagatgaggtttcatcgggtttcccagtctgctcttgaactcctgggctccagcaatcctcccaccttggcctcccaaagtgctgggattacaggcataaggtacccgcacccggctgggcagagctttttctagcagccccaatccaaggcaaacttgcttggtcttcagataaattcccagtccttacggggtgcatttgatgttcctggcactgtgcaaagctccatggagtagacggataccgatgagacgtcaatttgttcagccagcgtttgctggtgccatctggatgctgggaactaagcttgtcaccaggttctgccaggcgacattgtccctagcatgggaagtgggaatgaacaagcaggcagaggaagtcaaggacgattatgaggcgatgggaagggtctggtgacagagagggatggaaggggtgggggaatctgcttcccggaggaggcaacacgagagccaagatgtaaaagaggtggagccaggcagggagagagatgagggacaggcattcacaggacaggtgcaaaggccctgaggtgaggctgtgcctggtgtgttggagaagccgagaaggcttgtgtgaatgagtgagggggagagaggaaaagagagaaaggggaccggacatggtgactcacccctgtaatcccagcactttgggaggccaaggcgggcagataacctgaggtcaggagttcgagagcagcctgcccaacatggtgaaaccccgtctccactaaaaaattacaaaaattagacaggggtggtggtgcacgcctgtagtcccaggtactccagaagctgaggcaggagaatcacttgagcctgggaggcagaagttgcagtgaacagagattgtgccactgcactccagcctgggcaaaacagcgagactctgtttcaaaaaaaaaaaaaagaagaagaagaagaagaagaagaatagagagaaagggaactgcgggggaaggtcattcagggcctcagggcaggggatggagaaggctctggaatttactctgagatggacagacagagagatggagagagagtgactgagaaggaagaagagatgggggttcagctctgcaagacagggctgagactccagcccaagcctaagtggccactgaggtcttgttctaacccgtgtctccccacccccagacctctctctgatgcccccaactgcactggcagggagtgaccaccttgaacggaaaacggaatcagaacactgtgggcactccataaacatgagtgagtcagtacgtggtggagggagtgagggagggatggagtcgggggcggggaggggggcaggtcagcagggatacagactatgccaggcctcctgatcacaggaaagagtgtgggctatactatgagggtaatagggagccacgggagggctttgagcagaggaagggcgtgatctgctttatgatttttttttttttgagatggagtctcgctctgtcgcccaggctggagtgcagtggcgcgatctcggctcactgcaagctctgcctcccgggttcacgccattctcctgccttagcctcccaagtagctgggactataggtgcccaccaccacgcccagctaaatttttttgtatttttagtagagacggggtttcatatgttagctaggatggtctcgatctcctgacctcgtgatctgcccatcttggcctctcaaagtgctgggattacaggcgtgagccaccgctcccggcctgctttatgattttaagaatccatctggggctccctaggggagcaaggatggctgggggcaggagtgtaggtggcagggagccaggacagcatccacacaagatacagcaggccccttaggagctcagggaggctcagtttcattctggagccggagactgcaggacctgctgatgcactgaacatgcagggtaaggaaagagaagggacaagaatgagtccaggtcaggtgcagtggcttatgtctgtaatcccagcactttgggaggccgaggcgggaggattccttgagggagaccaggattttgagatcagcctgggcaacagagtgagaccccatctctacaaaaatttttaaatgagctgggcatggtggtgtgtgcctgtagtcccagctactcaggaggctgcagtgggaggactgcctgagccaaggagatggaggctgcagtgagctatgactgcactactgcactccagcctgggtctaggtgacagagtgagactctgtctcttttttagtttgtttgttttgttttgtttgtttgagacagagtctccctctgttgcccaggctggagtgcagtggcacaatctcggctcactgcaacctccgcctcctaggttcaagcgattcttgtacctcagcctcctgagtagctgggattacaggcacccgccaccacgccccactagttttttgtatttttagtagagacaggttttcaccatgttggccaggctggttttgaactcttgacctcaagtgatctgcctgcctcagcctcccaaggtgctaggattacaggcatgagctaccacgctcggctgaccctgtctcttaaaaaaataaaataaagagggccgggcgcggtggctcacgcttgtaatcccagcactttgggaggccgaggcaggtggatcacgaggtcaggagatcgagaccatcctggctaacacagtgaaaccccgtctctactaaaaatacaaacaattagccaggcatggtggcgggcgcctgtagtcccagctactcacgaggctgaggtgggaaaatggcatgagcctgggaggtggagcttgcagtgagccgagatggcgccactgcactccagcctgggcaacagagcaagactccatctcaaaaaaaataaaataaaataaaataaagagcgtatccaggaatcaggacccaggctactgtgtgatagtggaggcaccaacaggatggagaaggggcagatctcagggcgagtaactattctaagagccaggttttggccttgtgagtgtgaaatgcctgcaaggcactcagtggaaatatccaatgccattggatactgaggcctggagctctggggagatgcaggctggagacaccaatgggatagtcgacaacacgcaatgaggtgtggctatttggggcaagggcatagatacaaggtcaagggacaccctgctcttccaggactatcaaagccaagacatcacacccaggggtccaccctttacaactctgtccatgcccaacgccagtccctgttatcaggtcagcaggaatgctacctgcagggaacatggaattcagtgtccttgggcttaccataggtgctcctcttcttctctcaagtgcctatttatttatttatttatttatttatttatttattatttgagatggagtatcactctgtcactaggctggagtgcagtggcgcaatcttggctcactgcaacctctgcctcctgggttcaagcaattcccctgcctcagcctcccgagtagctgggactaccatgcccagctaatttttttttttttttttttgtattttagtagagatggggtttcaccgtgttggctaggatggtctcaatctcctgacctcgtgatccacccgcctcggcctcccaaagtgctgggattacagtcaagtgctcatttatagatggggagactgagttcctgagagtttggggcagcaggcagcggggcgggggagggggacaaggctgggacgtgaagtgggtctggagtaactctcagaataggccgtttctgcaatgcagacgtctgtgtaatcgttcattcattcaatgaacgtagtttggatccacacccttgcccatctcgcgctgatctgaaaggggacgtttctgttaggtgtggtggctcacgcctgtaatcccagcactttgggaggccaaggtggacggatcacctgaggtcaggagctgcagaccagtctggtcaacatggtgaaaccccgtctctactaaaaatacaaaaaaaaattagctaggcgtggtggcgcctgcctgtagtcagtcccagctacttgggaggctgaagcaggagaatcacttgaacctcaaaggcagaggctgcagtgagccgagatcacgccactgcacttcagcctgggtgcaacagagtgagaccccatctcaaaataataataatgatgatgataataatcataatgatgaaaggggcatttcaacgttcaccattgagcactcggatccaattaatttttaagctctggtgccccattttcttccagccaacagctcagctaattccaaagctattgatttgagccttctcatccctccacttaattatgccggtgctgtctgtatcttctcttgcccttttttctctgcggctccttctttgccaaggtcaagggtccagcgagcaaggaggatctcgctcagcacagggaattggaggaaggacattcctggccgagggcagggtgtgtgcaaaggctctgagattggacctcttattgaacttaattgtagctgtcaggctgcctggggcagagaaatcgatgagggcaaacttggcttatcgcctataaaatgaggataaaaaataatggtttctgccaggtgcggtggctcaagtctgtaatcccagcactttgggaggccaaggcgggcagatcacctgaggtcaggagttcaaaaccagcctggccaacatggtgaaaccctatctctactaaaagtttaaaaatcagctgggcgtggtggcgggcgcctgtaatcccagctactcgggaggctgaggcaggggaatcgcttgaacccaggagccagaggctgcagtgagccgagatcgcgccactgtactccagcctgggcaacagagtgaggctctgtctcaaaaacaacaacaataacaacgacaacagataataataataataattaataataatggtttcccagagaattaaatgggacaaaggcaacatcaatcttttgaaagttccaggccctgccctgcagggatgtagggtggaaataacactaggctgcaaaatgactggatgggcctggagtggttggatgggattggatggatcataaacaaaagtgattggattggtcaagaggaggagacggaggcaggaaataaaggcagacaaaggaacgtaataggttcagacccaatggaggcgaggttccggactcagagagggggcctcagcccaaagttcccagagtggccagctgggggcagcataagccattaggccatcccagggctgggagcagaggggaaccagggaccctctgtgaccctctgacggaggttaacttatttgacatgtgcctgcagtgtgccagacatggaacagaactctacaagcactcatttaatccccataatagagtttgcagatggggaaactgagaacaacaacgttaagttgctcacccaacgtcacacatcaggggagtggcagagcttggatttgaatttaggaagcccagctgaggcccttaacctctgcactctactggctctccttcccctaaatctcctaaaatgacagtttaaaactttttttaaggtggcgccgggtggggggtggggggcgggtgtgggtagggcacgggcatggtggctcatgcctgtaatcccagcactttggaaggccaaggcgggcagatcacttgaggtcaggagttcgagcccaacatggccaacatggtgaaaccccgtctctactaaaactacaaaaattagccgggtgtggtggcgcctgtagtcccagctactcgggaatctgaggcaggagaatcacttgaacctgggagacggaggttgcagtgagccgagatcacgccactgctctccagcctgggggacagagcgagactccgtcccccaccagaaaaagtcaggccagacgtggtagctcacacttgtaatcctagcactttgggatgcggaaagattgcttgggctcaggagttcaagaccagcctgggcaacaatagtgagacctcatctctactttatttattttatttatttatttattttctgagtcagagtctcgctctgtcacccaggctggagtgcaatggcacaacctttggctcactgcaacctctgcctcccaggttcaagtaattctcctgcctcagcctcccgagtagctgggattaaggcgcctgccactacgcccagctaatttttgtatttttggtagaaatggggtttcaccatattggccaggctggtctcgaactcctgacttcgtgatctgcctgcctcggcctcccaaagtgccgggattacaagcgtgagccaccacgccaggccctctactttaaatatgtatatattttttaagtcaaaaaaagcaagggctccctctcaacactctttctgtgtatctcacttatatgtcaactctggaagtgggtaccatcatttccattttacagatgaggaaactgaggcacaaaggagtgagctgagggccaggtggtgttatgtccaatgtaagtatcctaagagcatgtgaaatgaatttttggttgggcctggcttggaaaggggccagcacgaaccttgtcttctgcagcctccagtacctccgctgtcgccactggatccagccatgtccctagacccgccctagctcagggctacacccggactcactctgatcctccaagtcctgtttccccactctagactggctggagacctcgtggactcacaaccaacctaagaggttgaagtagggaggggagagaacactcaccgtggggcctctctttcctttgacccgtgagaaaaccatagaccagggatgccaaggcatttgcccaaaccacccaggtagtaggagacattgctggaccccaactcaggggtttgacttctcatatctataggaccaccataaggggactgtcaggcaggcctatctcagacccttggtgcccgcagctgaaaagcactctggggccctatgaaaatgctttaccgggcccggtggctcacgcctgtaatcccagcactttgggaggctgaggtaggcagctcacctgaggttaggaatttgaaaccagcctggccaccatggcaaaactccatctctactgaaaatacaaaaattagctgggcgtggtgacatgtacctgcaatcccagctactctggaggctgaggcaggagaatcgctagaacctgggaggcggaggttgcagtgagccgagatgacgccactgcactccagcctaggggatagagcgagactctgtttccaaaaaaagaaagaaaaaaagaaaaagagaaagaaagaaagaaaacgcttgagacccagaggcctgttcactttggctccaaaatgcaaaaagagaactgcaaagtccaaatgaatcgatgtttaattacattcagacacaggatgtcacctttatttgggttaaattcaatgcatctagaaacagccccggggttggttcactatccctaggaagacctcaggcagattgctaccagctgccagagagctacttgtagccagtagatttccaaaataaaatgataaattacaagaattaagtaataccaggtgagcgcttagcatatgcagggttacaccctcgggctgttttaactcttttaatccccacagcgaccctaccagttcaattgatggcgaaaccaaggcccagggaggtcgcacctctggggagagacagagctgagatttgaaccccaccaagcttggtgtctgtgcccttgactcctcaacctcacgttttacaatagggtcattagtagaaagggaggtgcggggacgttggtgaccgttagacttgctgcgggtctggatgtcgacacatggtgctgcttgggggcccagacgtgagcaggaattggaaactgggtctggacccaggttggtcacctccgccggggtaacaacactgcgcgccactttggtaggtcgcatccagctcgggatctggaccacgtggctgggatgcagcacagcccctgaccacgcccctgtgactgccgctgcctggaccacggctggcgaccaatgagaaggcgcacatcaaaagctccgcctacaaggccgttcttgcttgctgattggccatttcagcttcccatcacctctcccatcctctggcctacagcctccctggaatttttcccacacatctcccccgcaggcctttgcacacgctgttcccacagccagagataccttttcccctcttctccgggataaactgctttatccccccttctctgctaagatggcccctcctccaggaagccttccctgactcccaaaagtgagtggaggaggtcagctgctctcatcacattagttttcttatttgcctcccaagcaggctataagcttcttagaagccaggactgggtctcagatagctttgtctctccattgcctcacatagtaggtactcaagaaacgtatgtcaaatggaataattaatgaattaatctggtctcaaagattgaggagcactgagctagcagttaggagctaggaaatcctgaaggcagggctgggacacccgctgctggcttggcacagagtctaacacacagtgagtgctcaatacatgtgtgtggaatagaggagggaagggacatgtacatcatccctgaggacggcccacagtatgtgcttgatgttggctcactgcaccatttcatagtcccccacagccccagggacctaagtcagtcttatcacagttccagcctgtccagttggccacctctttccccatttgccccccatagccagccctgaggatggtggcgggaacatggtttcactctgtcgcccagagtggagtgcagtgctgtgatctcgggtcactgcaacctccacctccggggttcaagcaattctcatgcctcagcctcccaagtagttgagactacaggtgcgcaccaccacacctggctgatttttgtatttttagtagagacagcgtttctcatggtggccagattggtctcgaactcctgacctcaagtgatctgcctgcctcaacctcccaaagtgctgggattacaggagtgagccaccacacccagcccaagccatatatttcaaaacaaaaatattcagccgggcccggtggctcacacctgtagccctggcactttaggaggctgaggcagtggatcacaaggtcaggggtttgagaccagcctggccaacatagtgaaactccatctctactaaaaatacaaaaaatcagctgagtgtggtggtgggctcctgtaatcccagctatttgagaggctgaggcaggagaattgcttgaacctgggaggcagaggttgcagtgagccgagatcatgccactgcactccagcccgggtgacagtgcgagactccatctcaaagaaaaattatatttatatatataatatatataatatacaatatatagtatatatactatattatatattatatatagtatatacgatatagtatatatactatatatatcatatatactatatatagtatatatactatatatatcatatatactatatatagtatatatactatatactatatacactacagtatatattttatatactatatatactatagtatatattttatatagtatatatactatagtatatattttatatactatatatactatagtatatattttatacagtatataaaatatatactatataaattatatatactatatattgtatatattatatatacaatatataatatacgtatatataatatatagtatatagtatatataatatataaatatataatatatagtatatagtatatataatatataaatatataatatatagtatatagtatataaatatataatatatagtgtatatataatatataaaatatatactatataatatatattatataacatataaaatatatactatataatatatattatataacatataatacatattacatatataacatataatatattacattatgtataaatatataatatatattcaccatcaacttccactctgtgagaatcaattgcaaccacactctcttctcccaagagaccccctgtggtccccttcagagcccccagttcctctacccagggcacctcctgctttcaccccttcttccagcccattcatgatcacctggagagtctgtatctggttctgtctccctgagcctggaggatccttgaggccaggctggagtgagagtagcacagagggtttggctggtggtagtggggagggggattgttgagtaaatgaatgcatcatctgactggcaaactcccacacactcctcgaaaccccagttgcaaagtctcgtttttcaggataagttccctgtctccccagacatagtccccactttcccagctcctggcttcaccctctatcccagccctgacatcacagagatgggggacatctgtgtccagctgatcttcctccagacagatgtctccttgggcaccaggactgagaccgcttgggtatgccagcatcacccagcacaggaaagttgtcagggagtgtttattgaatgaatgaatgaatggatggatctcttgcagggcctacagtcagttcccctgggttcacatcccagtcattgcacaggtcactgaatctgtcccttgatgtctctgaccctcactttccaggcaactacatgtgtttactcgaagcccatgccccaggtggttgtgaagataaactaacacacaaatcttgtgactaaagggacgtcaggctccctggcatcccagagcaggagtgaatttcacccagaaccagcagctctgtcctccccctgccaccccacaggtgaatcgccccaccactagcatcagcacccagaacaggaatgttgtcaacacaagtgcttagtgaatgctgatacatagggttggcctgaggacgaggcaaggagacaagaaaggtggctattaaaaatctaacaacctgagcttggtacagtggctcatgcctgtaatcctagtgctttgggaggccaaggtgggaggattgcttgagcccaggagtttcagaccaacctgggcaacatagtgagaccctgtctctaccaaaaaaagaaaattttttttttcaaattagctgggcacgttgccatgcacctgtagtcccagctattcaggaggcagaggcaggaggatcacttgaacccaggagatcaaggatgcagtgagccatgatcatgctcctggactccagcctgggcaagagtgaggccttgcctcttataaaaataaaaaaaacgtgtctgggtgtggtggctcacacctgtaatcccagtgctttgggaggccgaggtgggccaatcacatgaggtcaggagttcgagaccagcctggccaacatggtaaaccccatctctacttataatacaaaaattcactgggcatggtggtgggcacctgtaatctcagttactcgggaggctgaggtgggagaatcgcttgaacctgggatgtggagattgtagtgagccgagatcatgccaccgcactccagcctgagcaacagggtgagactccgtctcaaaaaaaaaaaaaaaaaaatctagacccggtgtagtggcttacacctgtaatcctagccctttgggaagccgaggcaggtgaatcgcttgagctcaggagttcaagatgagcctaggcaacatggcgaaactccctctctactaaaaatatgaaaattagccaggtgtggtggcgtgcacctatagttccagctacttgagaggctgaagtgagaggattgcttgaacctggaggaagaggctgcagtgacctgagatgatgccactgcactccagcctgggtgacaaagtgagaccctgtctaaaagaaaaaaacaaaaaggccaggcgtggtggctcatgcctgtaatcccagcactttgggaggccaaagcgggccgatcacgaggtcaggagatcgacaccatcctggctaacatggtgaaaccccgtctttactgaaaatacaaaaaaaaaaaaaaaaaatagctgggcatggtggcgggcgcctgtaatcccagctacttgggaggctgaggcaggagaatggcgtgaacccggaaggcggagcttgcagtgagctgagatcacgccactgccctccagtctgggcaacagagcaagactccgtctccaaaaaaaaaaaaaaaaatctgacaactgaaatgttggtaggaaacagcctagatatttgttatccagccattccaaccctgggtactcaccggagagacagggggtatattcaccaaaagatacgtataaaaaggcttaaaacagcttttttctttaaagattttttgagacacaggatctcattatgttgcccaatctgttctcgaacttctggcctccagcaatcctcctgcctcggcctcccaaagtgctgagattacaggcgtgagcccccacgcctggcaatcaaaacaacaactttatccacaattgtcaacaccttgttgaggctcagaaaacaaacccctaaaatgaaggtctcagaaacaccagattttctctgaccttcttcgctgtctccgaggacccttcccctccgccagggttaccacagaaactagaattattttccccaaagtaggacagagaaaccagaactccttttccccaaagccagccataagccctaaaaatatgactaacttgccctctgcccttctgtgtaaaaactggccataaagaaattggccgggcgcatggctcacgcctgtaattccagcactttgggaggcagaggcagatggatcattttaggtcaggagttcgagaccagcctgaccaacatggtgaaaccccatctctactaaaaatacaaaaaaaaattacctgggcacagtggcatgcgcctgtaatcccagctaattgggaggctgaggcaggagaatcacttgaatctgggaggcagaggttgcagtgagccgagatcacaccactgcactccagcccgggagacaagagtgagactctgtcacaaaaaaaaaaaaaaaaaaaagagaaatgatctaacctaccttgtttgactgtacgccataagatccccattccagagagggttttgccctatacccagaaggaaagaacgctgctcagagaagccaagaagaatctagacagacaggccttgcagggtttccccactctgtctctgcacattgaaccttttttgccccatgtttgtttttgttttgttttgtgctttgttttttggagacagaatcttgctctgtcacccaggctggactgcagtggcgtgatctcagctcactgcaaactccttctcccgaattcaggtgattctcctgtgtcagccccccaagtagctgggattacaggcacccaccaccatgcccagctaatttttgtatttttagtacagatacggtttcaccatgttggccaggctggtcttgaactcctgaccacaggtgatcctcccgactcagcctcccaaagtgctgggattacaggcatgagccaccgtgcccggccagcccaatcttatttctacatcgctgctcatactttgttaaaccaaagcataaaaacggacaacttcccctgtgtcttgggggcttcattctgaaggctcccgcatatacaggttaaataaacttcaatgccttttttcctagtaatcaatcggccccatggcaatgacttttctgtgaaccttcagagggtcaaggaaaacttaacccctttatccctgcaacctggaaacaacccaaatgcccaccaataggtgaatggatagtgaaaaattggtacccagtggttatgtttttttttttttttttttttgaggcggagtctccctctgtctcccaggctggagtgcagtggcgtgatctcggctcactgcaagctccgcctcctgggttcacgccattctcctgcctcagcctcccaagtagctgagactacaggggaccgctaccatgcccggctaatttttgtatttttagttgagacggggtttcaccatgttagccgggatggtctcgatctcctgacctcatgatcctcccgcctcggcctcccaaagtgctgggattaacaggcgtgagccatggtgcccggccttttttttttttttttttttttttagataaagtcttactctgtcacccaggttggagtgcagtggcatgatctcaactcactgcaacctctgcctcctgggttcaagtgattctcctgcctcagtctcccaagtagccgggattacaggtgcccacgaccacacccggctaatttttgtatttgtagtagagatgaggtttccccatgttggccaggctggtctcgaactcctgacctcaagtgattggcctgccttggcttcccaaagtgttaggattacaggcatgagccaccacgccccgccatgattttttttttaataggaaaaccccaccaaagtgttggtgaggatgtgggcatattagaacctccatacgatgctggtgggagcgtaaaatagtgcagctattgtggaaaacagtctgggtctggcagttctacaaaaagctaaacacaggctgggtgctatggctcatacctataatcccaatactttgggaggccaaggtgggaggatcacttgaagcccggagttcaagagtagcctgggaagcataggaagtctttatctctaaaaacaacaacaacaaaaaaaataaaagttaaagggctgggcgcggtggctcatgcctgtaatcccagcacttggggaggctgaggtgggaggatcacctgaggttgggagttcaagaccagcctgaccaacatggtgaaacctcgtctctactaaaaatacaaaatattagccaggcgtggtggcacgcgcctgtagtcgcagctactcaggaggctgaggcaggagaattgcttgaacccgggaggcagaggttatagtgaaccgagatcgtgccactgcactccagcctgggtgacagagcaagactccatctcaaaaaaaaaaaaaaaaaaaaagaaaatgtatattcacacgaaaacttgtatacaaatgttcatagcaaaaaaaagccaaaaggtggaatcacaagagccaataattgtgatagccaaaaggtggaaacaacccaaatgtttattaacagatgaacggataaagaaatgtggcccggctgggcccggtggctcacgcctgtaatcccagcactttgggaggccaaggcgggcggatcacaaagtcaggagattgagaccctcctggctaacacagtgaaaccccgtctctactaaaaatacaaaaaaattagccgggcatggtggcgggtgcctgtagtcccagctacttgggaggctaaggcaggggaatggcgtgaacccgggaggcggagcttgcagtaagccgagatcacgccactgcactccagcctgggcgacagagcaagactccgtctcaaaaaaaaaacaaaaaaacccacaaaaaacaaaaaaagaaatgtggctcatccatatacaggaatatgattcagccataaaaagggaataacgtactgacacaagatacaacgtgggtgaagctggaaaacattatgctgtgtgaaggaagccagctgcaaaaggccacttactgcctgaaatgcctagagtgggcaaatccttaggacagaaagctgatttgtggttgtgagggactgcgggggggagtgcataatagggagttactgctgttgaggatagcatttattttcttttttttttttcaatttttatttaaaaaattataggctaggcacagtggctcacacctgtaatcccagcactttgggaggctgaggtgggtggatcacctgagatcaggagttcaagaccagcctggccaacatggcgaaaccctgtctctactaaaaataaaaaaaatagccaggcgtggtggtgcatgtctgtaatcccagctactcaggaggctgaggcaggagaattgcttgcacctgggaggcagaggttacagtgagctgagatggtgccactgcactgcagcctgggtgacaaagcaagactccttctcaaaaaaaaaaaaaaaaaaaattccgaatagagcgatagggtttccttatgctgtccagcctggtcttgaattcctgggctcaatggatcttcctgcctctgcctcccaaagtgctgggattacaggcatgagccaccatgcccgccctaggacagagtttctttttaagaggatgaaagtattccggaactagatattagcgagggtggcaggacgttgtaaatgcactaaatgtcactgatttgtacactgtaaaatggttaaaatggaggccgggtgcagtggctcatgcctgtaatcccagcactttgggagtctgaggcaggtggatcacctgagctcaggagtttgagaccagcctgggcaatacggcaaaatcccatctctacaaaacatacaaaaattagccagcagaggtggcctgcacctgttgtcccagctagtcaggaggctgaggtgggaggactgcttgagccctggaggcagaggttgtagtgagctgagattgtgccactgcactccagcctgggtaacctgaccctgtaatcccagcactttgggaggtcaaggtggatctcttaagcctaggagtttgagagcatcctgggcaacaaggagatgccatctctacaaaatatacaaaacattagccaggcatggcggcgcacacccgtagtcccagatacttgggaggctgaggtgggaggatctcttgagccctgaaggtcaaggttgcagtgagctgagatcaagccagtgcacctcagcctgggtgatagaatgagaccctgtcttaaaaaaaaaaaaaaaaaaaaaggccgggcacggtggctcatgcctgtaatcccagcactttgggaggccaaggctggcctgacaccgggagttcaagaccagcctggccaacatggtgaaatcccgtctctactaaaaacacaaaacttcctgggcatggtggcaggtgcctgtaatctcagctacttgggaggttggagcaggataatcacttgaacctgggaggcagaggttgtagtgagtcgagatcacaccactgtagatagagagagagagagagagagagagactcattctgtcaagcaggctgggttggagtgcagtggcgtgatctcagctcgctgcaatctccacagcccagactcaagtgatcctcccacctcagcctcctgaatagcccacaaccacacctggctaatttttgtatttttagtagagacggagtttcaccatgttggccgggctggtctcaaactcctgacctcaagtgatccgcctgtctcagcctcccaaaatattgggattacaggtgtgagctactacacccagcctgaccatgtctatattaaacctcaacaaaactgttaaaataagaaaataattgccaggagaagatgagaatatccagcagtcctgagggctcagggttccgttttccccacaaatgccatcatctgacgcctctggggatggtgaccttgaaacagtcatggagctgggccagaaaccagagaccagagtcccatgcctgggatttgagcagtggtctcagaggcttctcagtttctagggaaatgcaccccacatgtcccacaccagagtcctcaagcttgggaaatgctttgggacaggaagacctcatggctccaagtactcaggacattatctcccaaaaacctaatgggggagaccttcatccccaaatcagatccccctagtggagacatttcttcaggccctgtaagaccaactagtaatagaattaataccaacaggccggtgcagtggcccatacctataatctcagcactttgggaggccaagtggggcagattacttgaagtcaggagttcgagaccatcctggccaacatggtgaaaccccatgtctctactaaaaatacaaaaattagccaggcatggtggtgggtaccgtaatcccagctactcaggaggctgaggcaggagaatcccttgaacccgggaggcggagcttgcagtgagccgaggttacaccactgtgctccaacctagcctgcttgacagaacaagactctctctctctctctcagaatgattctggcaagggcgacagagtgagaatccgtctcaaaaaaaaaaaaaagaaagaaaaaaaagaattagtaccaacaatcataattcacagcgtgggcagaaggaagtggatagacttccattcagaagctcctgggttcgaatcctggacccatccataaatacacaaggaaggaaggaaggaaggaatagtggacaaataggcctttcagcccattccaaaagactttatcatatcccttctcagatgcccaagccttgtgttgcacaaggccagggccccagagaggcctcaggcttccaaaagtttccagccttataggggagatagtgcccgacacagacactcccactactattactgctcacagcaataacagaagaaatcacaggcaggcgagacacagggaagggagccaagggggagggacaaggatagaggaaggatgccagaaccaaaaagagagagaggaagtggagtgcaagaatggtagacggcacgtggccagtggctgttacacactggccagggaggaagttgggctgaacaacctagataataaacggcagcgggaggctgattcgccttcccagatctttcccatttctgttctgcttttctttgcatactcccggagacagggagctcactcctgagaaaggaggttcaatgtttcctgggcatggaccactgtccagaagttccaagcaagatgatttgtcaagtagtagcccctatgggtcaaagggctaaagggggccaggcgcggcggctcacgcctgtaatcccagcactttgggaggccaaggcaggaggatcacttgaggtcaggagttcgagaccagcctggccaacatggtgaaaccccatctctgccgggcacggtggctcacgcctgtaatcccagcactttgggaggccgaggcaggcagatcacgaggtcaggagatcgagaccacggtgaaaccccgtctctactgaaaatacaaaaaattagctgggcacagtggcgggcgcctgtagtcccagctactcgggaggctgaggcaggagaatggcatgaacctgggaggtggagcttgcagtgagccgagatcgcgccactacccttcagcctgggcgacagagcgagactctgtctctaaaagaaaagaaaagaaaagaaaagaaaagaaaagaaaagaaaagaaaagaaaagaaacctcatctctactaaaatacaaaaattagcagggcatggtggcggacacctataatcccgctacttgggaggctgaggcaagggaatcgcttgaacccgggaggcagaggttgcagtgagctgagattgtgccattgcactccagcctgggcggcagaatgagactccatctcaagaaaaggaaaggagaggagaggagaggggagaggaggggaggggaggggagggagaggaagggaggggaggggaggagaggagaggagaggggagagaaggggaggggaggggagaagaggagaggaggggaggggaggagaggagaagagaggggaggaaaggaaagaaaagcctaaagaggattatctggggagagagaggtacccatgtgcgcaacgcaggcagtcccttgcacaggctggatctagagtaagacccacttgggttcaaacctgctctaccacttacaggcctggtgacttcatccctccaaatctcagtttcctcttctttcctctgaaagtgaccacagtaactgtgcctactcatctgtgcctacatacaagcacaaaactcatcgctttgtgcttgtatgtaatgagctaatgcaataaaatacctggcgcacaggaggtgcagaataagtgttgccctgttccaggcaggcccagagtgctccggttgtgtcccaaacacacatgtactttcttacctctaaaactttgcacctgctgtaaacttctgcctcaccagctcttgccccaccacccacaaggcaaactcctacacatcccttaaagccctacctacaagatagatttcttttctctgttcaagccctgacctagagagctgggagcatccataggcaccgggttctgatgcggcctactgtcatgtgatgtgagttcctggagggcaggagttctgacctacatgcagcaggcacgcaatcaaagcttgttcaatgaaaaaaaaaatgaatgaatggtcacttgggagaggcggctcccaagcggacacccaggagtcggccaacccctttaacgcccgcatcccctgctctccacgacctcaaagggcctgtaagtggtcgacaaaaaggggcggggatgcggtggttccgggcggggtcttcagcccttccggtgcggcccctttaagaggcggggcctgcggggcgggcgccgagaacgccggggcggcccgaagatggcggcggtggctggatctggggctgccgcggctccgagctcactgctcctcgtggtgggcagcgagttcgggagcccggggctcctcacctacgtcctggaggagctcgaaagaggtcgggctggcctgggggcccgcgggagcccgggaggcgggcccgttcgcgcgtctgggcccggggccggcggggtggggcggcggcggcggcggcggcgggacccgggctccggggcgggggtcgcgggcctggggctgggtccccttcaccgttaggcgcacgacgcgggcaaaggcggggtgcccgtgggtgcccgcggagaaagtggcatccgggcctgggctgggcagggctgccccgccccaactccgggtgaagataggggaggggacacgggcctgggcttggggacccttgcagttggaccacggctccgcttcccgcctgactggcctgcccgggggtagggcctggggtcgctttggatctccaggtcttagcagcttagatagagatctcccggagggagaagcagatatgggggaggctgggcctggagccccggggcccgctttctgttgcctcacaaggagctgctaattggggtgtgggcgggtgcggcctgccctggggatttggcacctagggaggtgagtcataggcgcacctgccaggttcacctgcagccacttggctcagtgggactggcgggcgtgatgcgcccgtgggtggagatgggtgttcatcccccatccctcggagcatctggacctggcgtttcattgcatgtaaaatgggacaggaacacgcacctcggttcatgtgcttgaggagtgtttagtgagcacctgctatgcgccaggcctttgggcagtggacacagggatatggccgggatgatagacaggttcagccctgccaacacaggtctggtttggggatggacccaaagcgagtgaggagatggaacaagcttccagctcacatggtgtcaggaaggatgagaaggctgcaagggactgagaggacagtcagtcttagcacccgaaggtgctgagggggaagggccccctggccagtaggaacaggtgggggcggcagggggatggacttccaggcaggggaaacagctgttgcaagggcggtgagtggaaacgggtctggcagggcataggagcagcgaggaggtggagatggaggaggtggaggctttgttgctgatgaatcttgtgtgtaaaatgatgaggtgtgctctgggtcccctggctcagctgcagcgagacctgaaggtgttgggtacttctgagtctccaagctgtgagtgaagggaggaggctggggcgctccccacccacggggtgctaattattgaaatattctgggagctggggggcccggctgaactcccgccttgatccctccttcccaccaggcatccggtcttgggatgtcgatcctggcgtctgcaaccttgatgaacagctcaaggtctttgtgtcccgacactctgccaccttctccagcattgtgaaaggtgaggctggggtccccctgactgctccctacctcttgttatttggggaagtgccagccgtgtgccaggcatggggggtgggatgcagctataaataacaacagtaataatacagttgagacctttcaaatgcaagccgtgacccagtgataaccccctcagtcctcagcaacccacagtgcaggaactggtgtttttgtccctgattgacagatgaggaaattggcattgaagggggaagaggcagggagatctctgaggagggggttttttgatgagaaactgctatgactggtgtgtccagtggaagggaagggccccagtcaagacccagcagtggacagaacatctagaatgaaccgggcgcggtggcttacgcctctgatctcagcactttgggaggccgcagcgggcggatcacttgaggtcaggagttggagactagcctggccaacgtggaggaaccctgtctctactaagaatacaaaaataacggcatggtggcaggcgcctctaatcccagctactcgggaggctgaggtgggaggatcacatgaacccaggaggcagaggttacagtggggctgagactgcgccactgcactcctgcctgagtgacagagtgggagggactctgtctcagaacaaacaaacaaacaaaaaacatctggaaggtggaggggcactgagcaggccctggaagatggagtgtgggccccttgcaggaagggactgatactggttcacagccacaggcctgggtatacagtaggcagggaactgaaaaggagtgagatcaagaagggcccaactcagcacgaggctcccttctagggtgacccagggtgagcagagcagcaggcgggcaggcagggcttgggtgttgcctgcagccgcccccggctcctgatggtctcttgagtcacctcccggctgctgctggagaggaaggaagtgtctgtagtctcattgtcccagttggtccttgtggcttcctgacacttcatggggcagaaagtggagctggaaatcctgtctgctgtgtgtgaacttcgtggccacttcccttctttatgccttgatttccccacctgaatggggcaatatccctgtgtggcaaaaagcgtgctaaggctgggtggggtggctctcgcctgtaatcccaacactttgggaggtcaaagtgggaggattttttgaggtcaggagttcaaaaccagctggggcaacatggtgaaaccctgtccctactgaaaatgcaaaaatgagctggacctggtggtgcacacctgtagtcccagctactcaggagcccgaggagggaggatcgcttttacccaggaggcagaggctgcagtgagctaagattgtgccactgcacttcagcctgggcaacagagcgagaccctgtctcaaaaaaataaacttaggcctgacatggtggctcacacctataatcccagcactttggaaggctgaggtgggtggatcacctgaggtcaggagttcgagaccagcctgaccagtatggtgacaccccatctctactaaaaatacaaaaattagctggttgtggtggcaagcgcctataaccccagctacttgggagactgaggttggagaattgcttgaactcaggaggcagaggttgcagtgagctgagatcgtgccactacacttcagcctgggcaatagagggagattccatctcaaaaaagagagagagagagagggagggagggagggagggggagagggagggagagagagagagaaaggaaagagaaagctaaatgtgataagggcgagagagagagaaagggaaaagaaggaaagaaaggaaagaaagttaaatgtgataagggctggcaacactggagggtctctgcctctcaagactcagccttgttcacagttcagtcctgcctcaggggccttggctggtgctgtaccctggtccgggttggccctcaccggcccccaccccggctctggctccttgccacccccctctcacagtactgatgtttaaaacacatacgggccctgggggacagagcagggtcaggatcccagaaacagccctacttcagccccggcccttatgctgccccacccctagctgagtcctgcctcaggacctttgctccggatgtaccctcgtccacgttcgccctcattggccctcctcgagctctggctctctgtctgaaaaataaatgtggccggatgggtgcagtgggtcaagtctgtaatcccagcactttgggaggccgaggcaggcggatcacctgaggtcaggagtttgagaccagcctgacccacatgttaaaaccccgtctctactaaaaattgaaaaaattaatggggcgtggtggcgtgtgcctgtaatcccagctactcgggaggctgaggcaggagaattgcttgaacccaggaggcggaggttgcagtgagcccaggttgcactgttgcacgccagcctgggcaacaagagcaaaactccgtctcaaaaaaaaagaaaagaaaaaggccgggcgcggtggctcacgcctgtaatcccagcactttgggaggccgaggcaggcggatcacgaggtcaggatatggagactatcctggcttacacggtgaaaccctgtctctactaaaaatacaaaaacttagccgggtgtggtggcgggcacctgtagtcctggctactcgggaggctgaggcaggagaatggcgtgaacccgggaggaggagcggagcttgcagtgagcagagattgcaccactgccctccagcctgggcgacagagcgagactccgtctcacaaaaaaaagaagaaaatggtggcatcactcccaggggtgacagctgcaaaccaggccctgcgcacgatggggccctctggttactgcctctcttaggccagctggggtggtttgagtttctctttcttgcctggtcctgacctgcagctctgccgtgcgcctgttaatctccatatgatccctgggtgggttcccagaggggttcatgttccctgagggtcacacggggaggcaggatttgactccgggacggcctgattcccccacaggccagcggagcctgcaccaccgtggagacaacctggagaccctggtcctcctgaacccatcagacaagtccctgtatgatgaggtagggaatggctgacgtcctggagggggcgggctgctgggacccgtgccttctctgtcttcctgtctcgtgtccttgtcttcatgctgccccagatcctctcaagacacccggcaccacacttcttcgcccacgaagccttccctgtggcttcagcctccgcttcttccctcctctggggtgggagcagaaaagcctggactttgggagggaggggagggtaagcactcccagctcagggcccaggacagcgtgggtctggaggtgggaaggccagagcagacaggttttcctcctgtgggttccctccggctaggccccaggagttgtctgaatcgactcactaacattaaccagcttgtggccatctgtactctaccaattatacatccggaagatgaaccagacagagccctggggcatcccactacagaccttcttacaggttgattccttggatcaacttttcccttttgttcccttgaggggctctcagtctttaagagacagagtgagacacagacacccccagccctgtggcatcagggctgggctggagggagaggtggactagagagagcccagaaagggcaagtagtgccttcaggaggaagggacatcagagctgggctttgtaggatgaataggagtttgctagggttgctccagggcccagcaggagacctggagactgccttcgtagctagttgagcactgggctggtcgtggggtgaggacaggagaggggtggttatgtatcgactcgaggctaccccaaagaggactgctggatacgtcactgcacagaacgggtcctttagtgttcaccccctccctcagctccggaaccttctgttggaccctgcctctcacaagctactggtgttggctgggccctgcctggaggagacgggggagctgctgctacagacagggggcttctcgcctcaccacttcctccaggtcctgaaggacagagaggtaagccacccctttgccatcccctgcttccccagctctgaatcctgactggggtgtatcaggctgtgtggcaccagcgacctgctgttttccatggcctggtctccccatcctctgtaggatggcagtggtgacacatgcctcctggctgtctggggtcagtcccattgcccgcgaaagggtgtggtgtgagctgagtttgtaggtcagcagatgtcccaaagtcctgatgagggatggagccaaatgggtccttcctggtgcccgcagtctgggtaggacacatgggcaaaatggcaaacctcactttcacattgtagtggggcacttaaaaatggtgagaaaaggttcagtagacaggtggggcgtggagagtctccttggagggagctgtgccctgggaggagagaatggtgagtgtaaaggccctggggcagggaggcatttgaaggggagggagagacaggaggtgaggccagatcaaagagccttgtggcgctggagagggttgggttttggcgggagggccctgaggagcaggccctgggggaaaggatgagggtgtcctcgcccagttttcccaccgggctaggtgttgcctggctctaggtggtcccttaccactcctcctccatacagatccgggacatcctggccaccacgcccccacctgtgcagccgcccatactcaccatcacctgccccaccttcggtgactgggctcagctggcacccgctgtgcctggccttcagggggcgctccggctccagctgcggctgaaccccccggcgcagctgcccaactctgagggcctgtgcgaattcctggagtacgtggctgagtctctggagccaccgtcccccttcgagctgctggagcccccgacctccgggggcttcctcaggctgggccggccctgctgctacatcttccctggaggcctcggggatgccgccttcttcgccgtcaatggcttcactgtgctggtcaacggtggctcaaaccccaagtccagtttctggaagctggtgcggcacctggaccgcgtggatgccgtgctggtgacccaccctggcgccgacagcctccccggcctcaacagcctgctgcggcgcaaactggcggagcgctccgaggtggctgctggtgggggctcctgggacgacaggctgcgcaggctcatctcccccaacctgggggtcgtgttcttcaacgcctgcgaggccgcgtcgcggctggcgcgcggcgaggatgaggcggagctggcgctgagcctcctggcgcagctgggcatcacgcctctgccactcagccgcggccccgtgccagccaaacccaccgtgctcttcgagaagatgggcgtgggccggctggacatgtatgtgctgcacccgccctccgccggcgccgagcgcacgctggcctctgtgtgcgccctgctggtgtggcaccccgccggccccggcgagaaggtggtgcgcgtgctgttccccggttgcaccccgcccgcctgcctcctggacggcctggtccgcctgcagcacttgaggttcctgcgagagcccgtggtgacgccccaggacctggaggggccggggcgagccgagagcaaagagagcgtgggctcccgggacagctcgaagagagagggcctcctggccacccaccctagacctggccaggagcgccctggggtggcccgcaaggagccagcacgggctgaggccccacgcaagactgagaaagaagccaagaccccccgggagttgaagaaagaccccaaaccgagtgtctcccggacccagccgcgggaggtgcgccgggcagcctcttctgtgcccaacctcaagaagacgaatgcccaggcggcacccaagccccgcaaagcgcccagcacgtcccactctggcttcccgccggtggcaaatggaccccgcagcccgcccagcctccgatgtggagaagccagcccccccagtgcagcctgcggctctccggcctcccagctggtggccacgcccagcctggagctggggccgatcccagccggggaggagaaggcactggagctgcctttggccgccagctcaatcccaaggccacgcacaccctcccctgagtcccaccggagccccgcagagggcagcgagcggctgtcgctgagcccactgcggggcggggaggccgggccagacgcctcacccacagtgaccacacccacggtgaccacgccctcactacccgcagaggtgggctccccgcactcgaccgaggtggacgagtccctgtcggtgtcctttgagcaggtgctgccgccatccgcccccaccagtgaggctgggctgagcctcccgctgcgtggcccccgggcgcggcgctcggcttccccacacgatgtggacctgtgcctggtgtcaccctgtgaatttgagcatcgcaaggcggtgccaatggcaccggcacctgcgtcccccggcagctcgaatgacagcagtgcccggtcacaggaacgggcaggtgggctgggggccgaggagacgccacccacatcggtcagcgagtccctgcccaccctgtctgactcggatcccgtgcccctggcccccggtgcggcagactcagacgaagacacagagggctttggagtccctcgccacgaccctttgcctgaccccctcaaggtccccccaccactgcctgacccatccagcatctgcatggtggaccccgagatgctgccccccaagacagcacggcaaacggagaacgtcagccgcacccggaagcccctggcccgccccaactcacgcgctgccgcccccaaagccactccagtggctgctgccaaaaccaaggggcttgctggtggggaccgtgccagccgaccactcagtgcccggagtgagcccagtgagaagggaggccgggcacccctgtccagaaagtcctcaacccccaagactgccactcgaggcccgtcgggtgagtactggagctggggccctgggctgggttagcagctgcttaggctggagagcatagctcgtccccctgtttttacattttcagtttttttaaaagagatggtctcactctgtctctgagctggagtgcagtggtgtggtcacagctcattgcagccttgaacaatggggctcaagccaccctcccacctcagcctctccagtagctgggactactggcaccgccactacccctgcctaattttaaagtttttggtagagatagggtcttactatgttgcctgggctgatttcaaactcctggcctcaagctgtgtgcccacctcagcctcccaaagtgttgggatgactggcgtgagccacggtgccctgccagttctgttcttttttttttttttgagacagaatttcgttcttgttgcccaggcaagaatgcaatggcacgatcttggctgactgcaacctctgactcccgggttcaaacaattctcctgtctcagcctcccgagtaggtgggattacaggtgcctgccaccacgcctggctaatttttgtatttttagtagagttggggtttcaccatgttggccaggctggtctcgaactccggacctcaggtgatctgcccaccttggcctcccaaagtgctgggattacaggcatgagccactgcacccagccaagtcctcctgttcgtaattacttcgtgacctcagccgtgcccacctctccggggctcagtttctcctgtgaaatggaaactgacctcagtgttgaagcacttgccattctgaggtgcctggacaggtgagcacgtatgccaactgtgggtttctagaagccacaataagtaaaatgaaacagttgaaaatttaaatagcgtattttatgtaactgattggttaggaggacccggcctatggttgcactcatagcagagcaaaatcagcaaagagaaaaggcacatagggtgaagtccaaaggaaaccaggcagaagcttccagaatcctctcccagtggggctgcacaccacaggcttcatttctccagtagcaagttgtaacagtgtgtccctcatggaagctcattagacacagcatgcccaggtttcctattgggccattacataggcatcttctgcctggcacccacactctagactccccaaaaaggagaaatcaggtgtgtggtccagtccaggcacagggagcccctctcagacagggaatggtgggaaccctctgcctaagatccaaattcccagagaccagccaaaggctcacattttaagcaggccttgctgagaggagggtctctggcctgctgtgctgttctttgttttttttctgagacagagtctcactctgtcatccaggctggagtgcagtggcgcaaacatggctcactgcagcctcgacctcctgggttcaagcaaccctcccacctcaacctcccgaacaggtgggaccacagacacgcaccataacggccagctaatttttttttgagatggagtcttgctctgtcaccaggctggagtgcagtggtgcgatctgagctcactgcaacctctacctcccggggtcaagcgattctcctacctcagcctcccaagtagctgagattacaggcatgcgcaaccatgcccagctaatttttgtatttttagtagagatggggtttcaccatgctggtcaggccggtctcgaactcctggcctcgtgatctgcccgcctcggcctcccaaagtactgggattacagacgtgagccactgtgcccagcctacgcccagctaattttaaaatttttcagtagcactggggtctcactatgttgccctggctggtcttgaactcctgaactcaagtgatcctttggcctcggcctcccaaagtgctgggattataggcataagccaccacgcccgactcaacgtttaattttggatgaaccgccagactgttttccacagcagctgcttgacgctagccagtctaatgggtgtgaggtgggatctcattgtggttttgatttccatgtccctaatgattagtgatgttgcatcttttcatatgcctattggccatttgtctgtcttctttggagaaatgtctattcaattcctttgctcattttaaaattttgttttactttttagagacagggtctcggtctgttacccatgctggagtgtagtgcaaacacagctcattatagcctcaacttcctgggctcaagtgatcctcccagctcagcctcccaagtagctgggactacacaggtgcatgccatcgtgcctggccaattgtttaatgttttgtagagatggagtctcactatgttgcccaggctgatcttgaactcccagcctcaagcgattctctcgccttggcctcccaaactgttgggattacaggcatgagccaccatacctagccccctttgcccatttttaaattgagttgttttccgttgctgagttttaggagttttttaaatcattctggacattaatcctttagcagataaatggcttgcaaatatttcctcccattctgtgagctgcctttttattcttttgatagtgccctttgatgcacaaaagttttaaattctcatgaagtccattttgtctatttttttcttttgttgtctgcacttttgatgtcagacccaataaatgattgccacatcgattttttttcttttttctttttcttttttttttttttcagatgagtctggctctgttgcccaggctgcagcatgggagcactatcttggctcactgcaacctccgcctcccgggttcaagcgattctcctgcctcagccttcctgagtagctgcgattacaggcacccaccaccacacctggctaattttttttgtgtttttagtagacacggggtttcaccacgttggccaggctggtttcaaactcctgacctcaagtgatctgcccgcctcggcctcccagagtactaagattatagatgtgagtcaccatgcctggtcaaatccaacagtgagaagcttctaccccatgttttcttccaggagttttaagttttccatttcacatttaggtccatttggaggtaatttttgtatgtggtgaaaagatccagtgtcattctcttgcatgtggaagcccagctttcccagcaccatttgttgaaaagactatcctttccccattgaatgtttggaacgcttgttgaagatcatttcagcatacatgtgatgatttatttccgggcctctattgtattccattggtctatatgtctgtctttatgccagtgccacgctgttttgattactgtagctttgtagtaagttttgaaatctggaagtgtgagtcctctatcttgattcttctatttcatgattgtttaatctccttttcacattgttcattgttcatgtatagaaattcaactgtgttttgcctgtggactttgtaccttgcttctttgctgaattcgtttattattattttttgagatggagtctcactctgtcgcccaggctggagtgcagtggcacaatctcagctcactgcaacctccacttcctgggttcaagcagttctcctgcctctgcctcccgagtagctgggattacaggcacctgccaccacgcccagctaatttttgtatttttagtaagagacagggtttcgccatgttggctaggctggtcttgaactcctgacctcaagtgatctgcctgcctcagcctcccaaagtgctgggattacaggcgtgagccactgcacccccaggcctgattttttacattattgttcataaagtctgttgaactggcattttcttgtagaattaaatatctgtgcctggctttggtattaagacaattctggtcttataaaatgagttaggaagtgttccttcctcttcagttcctcggaaaagtttgagaaaggctgatgttagttctctaaatgtttagtggcttccccagggcttttctttgttgggaggtcgtaagttactgattcattctccttgctagctacaggtatgtgctgattttctatttttgtgattgtgtcttggtagtttttgtgtttctaggaatgtgtccatttcggctgagggtatgcatttgttggtatacagacggggtagtactcttaccccctgagctgggcagcagctgtgattgtaagatgcagggtctggcaggcttcttgtgcccgagacccagccgtatcctttcatttcattgatcattcacttgcccagggctggtggccttgtcccctttggccctaaggtcagggtttggacaaggcccccagagctgctgtctcatccgcatccagcatcccgcagtgatcttgggcccgcctctcaaggctctgtccacccaccctggctccccatcacccttggggcagggattctgtctgtcttggtcacagccctgtttcagggcctggtgcccatgaggttctgttaaatgccccttgagcaagtgaaccagacaaatgctgcagaagcagcagatggtccaggcactggctgctttcagggctcaaactcttaaaccctcttccaggaagcattccctgattgccacccactcgccccccagccctggggatgtctatgtccagggactggctggggatgagtcaggctctaggcacaaaggggtggccggtggtgtttgtagagtgagtgaagagtcactggagtcaaggcgtggtgacatgcacctgtagtcccatctacttggaaggctgaggcaggaggatcacttgagcccaggagtttgtgacgagcctgggcagcatagcgagaccccatttcttaaaataagattcactggagtcatgagcgcaccaggcctccccagaaaactctgagttcaggcctcctgctgaggagggagctgctctgagtggtgcaggtcgaacttggagcctcggcccctccccagccccaggagctcatccctgcctccccatccccccgcccgcagggtcagccagcagccggcccggggtgtcagccaccccacccaagtccccggtctacctggacctggcctacctgcccagcgggagcagcgcccacctggtggatgaggagttcttccagcgcgtgcgcgcgctctgctacgtcatcagtggccaggaccagcgcaaggaggaaggcatgcgggccgtcctggacgcgctactggccagcaagcagcattgggaccgtgacctgcaggtgcgtgtcaccccagggcctctggtggtaagtgtagttagcacagatgggtaaaaccaccctcgaccctcagagactaagctgtgttccccaggccacacgggaatgggggcgaatgtgggagtctcacatggctcagcccttaggggtctcttcggactctgattctgtcgtgtcactgttgtcattggctgtgctggaagcctgggggaggacgcagggcctcgtgaagcctcatggttctatcccttccccagacaccttgtcacttagccattgttccgctgtgagaattagtcgggatggaataggtgggctgggtggtatctgtgcggctgagaaccctcccccatggctgcatgaagctgagagactgaaaccaagccctgcagggcgaggtgcatgtgggcagagggaggaccgcctcacaccgcggcccctgccctctcatagctgctaggctggcttcaaaggagtgtccctgtagggtgcacgacccaggaaaaggcccagaggtaggaaagaggttggtgtgttcaaggagcagggggagatccaagtgagtagagaggggtctcaggccaaggaaggccttgcagaggaggagctccgtctcctgtgtgctgagaaggctctttgggtgctggttgggaggaacagggacctcacagacgggctgaccacccattgcagacctcaaggtggagcacacaagatcagggaaaagccaggaggggtctcaaatgccaggaaaggaaggcgacttgggcccaggccagaagggcagggggcacccccctcactggtggtccactctccccacacaccccccctccacctgcaggtgaccctgatccccactttcgactcggtggccatgcatacgtggtacgcagagacgcacgcccggcaccaggcgctgggcatcacggtgttgggcagcaacagcatggtgtccatgcaggatgacgccttcccggcctgcaaggtggagttctagccccatcgccgacacgccccccactcagcccagcccgcctgtccctagattcagccacatcagaaataaactgtgactacacttggctgtggcctctcttctttctgtgatgggagacttggcatgtacctcctggtcctgcgggtggggacagcttccatggaatccccagtgaccctgcggtcaggcccactctggcctccatgtcgcagatgggagaaatgcaggcttcgctgggcctggtttggggaaggaagtgcctctcagagttaatgaccactgaccggtggagctcctgactatggcctccatcccgactcagcaactgtgaggggcccaagttataggcgcgaagtagctacctgactatctgtcacacaaaccagttggtggcagggggagattgaatacctgtctctgctccaaagccatcaaacaaaagctatcctgctgtccctagaggagatggatgcttattccagaaagtcttactctgcaggaaggatttacagaggaatctgaaacccagagattacagaatatccacttctgactaatgcaccctgacccctctctgcagaaatacaagcacttaggtttactattagatacaatgtcatctgtactgggttgaatggcagccagcccccaaaacacattcaacacctgacccctgacacctgtgaatgtgatgttattttgaaaaaggatctttgcagatacagttttattattttttgagatggagtcttgctctgtcacccacgctggagtgcagtggggcgatcttggctcactgcaacccccgcctcctagattcaagcgattcttgtgcctcagcctctctagtagctgggattacaggcacacgccaccacgcccggctaatttttgtatttttagtagagacggggtttcaccaggttggccaggctggtctcgaactcctgacctcagatgatccacccgcctcggtctcccgaagtgctggattacaggtgtgagccaccatatgcctggcccttcacagggtcttacggtcacagggtaggtgatcaggaagggcaggtggagcagaggagccatgcctgtgcctgccacctcctgtccaatgcctgctagcaatgccaagatcgctaagctcagccagccacctcccacttccacctacccaccctccacacctctgcagcggaaacttaacagggatgggagtcctgggagaaaggccccagcctaggcgagttgacacagcagtgcaaagccagccctgcccagttccccatcagctggcactcaagttatggccttttctccgttgccagggtaaggatggacctcttctggggtcaccatttatacatgaggatgattcccctgggtttcttgttttggccaaactgtctagtgacccctgctgcctacttgttcttatttcaattgtcccgttatcagggaggtttctttctatttatgggctctttcttttttttttttttttgagacagtttctctctcttgtccaggctggagtgcaatggtgcaatctcagctcacagcaacctcaggctccgaggttcaagcaattctcgtgcctcaggctcccgagtagctgggattaccggcatgttccaccatgcccggctaatttttgtatttttagtagaaatggggttttgccatgttgaccaagctggtctcaaactcccggcctcaagtgatccacccacttcagcctcccaaagtactgggattccaggcatgagccaccgtgcccagcccaggcctttttccttctttctcttgagacagggtctcgctcagtcacctagatgactgcagtggcacaatgtcggctcactgcaacctctgcctcctgggcttaagtgatcctcccacctcagcctcctgagtagctgggactgcctggctaattttttgtatttttggtagagccggggttttgccatgttggccaggctggtcttgaactcctaacctcaggtgatccacccactttggcctcccaaagtgctaggattacaggcatgagccactgggcccagccctttttttttcttttgagacagggcctcactgttgcccaggctggagggcagtggcatgatcatgtctcattgcagcctcgacctcccagactcaagtgatcctccgaccttggcctcccaagtaagtaggaccacaggtgtgcgtcaccacacccgcctaatttcttttattatttgtagagatgagatctcactatgttgcccaggctgatcatgaactcctgggctcaagcgatcctacttcggcctcccaaagtgctgggatttacaggcgtgagccactgtgcctggcttacaggcctttttctaattagctggtttgatatttttctcattgggtatttgtctttttctcattcctacacaattttcttttttaaattagggataataaacttatgtggtaaatgttttccaaatgtacttttccattttgtttaggcatgattttgctgtagagatatatatatttttttgatggtctctcgttgcccaggctggagtgcagtgggtgggatcacagtcactgcagcctggaacttctagcttcaagtgatcctcccacctcagcctcccaaagtgctggaattacaggcatgagccactgcacctggccaaactgcaactttttttttaaaacggagtcttgctctgtcacccaggctggagtgcagtggcgcgatcttggctcactgcaagctctgcctcccgggttcacgccattctcctgcctcagcctcccgagtagctgggactacaggcgcctgccaccacgcccagctaactttttttttgtaattttagtagagatggtgtttctgtctctattaagatgaggagagtacatagaacttgccagtcatttcaacaaatgttgtaaatggacagaaatctctagttaaaaggcaaaaggtggctgggcacggtggttcatgcctgtaatcccagcactttgggaggctgaggtgggcagatcacttgaggtcaggatttcgagacccccaacttgggcaatgtagtgaaaccccatctccactaaaaatacaaaaattagccaggcatggtggcacatgcctgtaatcccagctactcaggaggaggctgaggcaggagaatcacttaaacctgggaggaaggacgttgcagtgaggcgatcgtgccactgcattccaacctgggcgacagagcaagactctgaaaaaaaaaaaaaaaaaaaaaaaaagccaaagaataaactttgttggtattgtaagccatatagtctgtccagaccactgaattcctttgttgtaggctgaacagactacaacaaatgggtgtggtataaacatagaaccagtccaatctggttcagctttgttagtaacaaaatgtaacaaaatgatgagtcgtttttcagtgcaatggacccccagggtgcaagtcacatatcgctggagcattaacagatgaacaaagcatgcccaattcataacccttgggtggaatgaaaaagtcaactacaggtagaacccaagtactcggatcaaggaatggggactatgctgggcgtggtgactcatgcctgtaatcccagcactttgggaggcccaggcagacggatcacctgaggtcaggagttcgagcctggccaacatggtgaaaccgtctctactaaaaatacaaaagaaactaacggggcatggtggtgcgcacctgtaatcccagctactcaggaggctgaggcagggagagttgcttgaacccaggaagtagagattgcagtgagctgagatcccaccgtcactgagatccagcctgggtgacagagcgaggctccatctcaaaaaaaaaaaaaggaatggggaccaaattaaaaagagaaagctgggtgtggtgtctcatgcccaggaattggagactagcctgggcaacatagtgagaccccgtctacaaaagatacaaaaattagctgtgtgttgtaacatacgcctgtagtcccagctacttgggaggctggggtgggaagatcacttgagcttccggaggttgaggctacagatagctgtgatttcgccattgcactctagcctgggcaacagagcaagaccctgtctcaaaaaataaaagggggagggcggtgccttgtttactgcagtgtggacttgagcaccaaaaacacatcatcgcccctgcacgtgatgcagtcatatcacccccattgcatttccgtatctctcccatgataaccctctgcctatgaaacctgcccccaagctccagcttgaagagacagatttgaacttcgcctactgtctccttgccagttgactctcaaaaaagctttttaggccaggtgcagtggctcatgcctgtaatcccagcactttgggaggccgaggcagacgcatcacttgaggtcaggagttcaagatcagcctggccaacatggagaaaccccatctctactaaaaatacaaaaattagccaggtgtgctggtgcacgtcttgtaatcccagctactctgtggcagaagaattgcttgaacctgggaggcagaggttgcagtaagctgagatcgcaccactgcactccagcctgggcaacagagcaagattctgtctcaaaacaaaataaaaacaaaaactgttggaagttcctcccactgggcaaacagtgtcaggtgggcgagtgaaacacaaagaagcaacagcccatggtgtgaggtgtggggaggtggcacgcgcaccccgagggctcagaggaagccttttagcgctgccgccttgggggttaaaggaggcttcccaaggatgcaaaagggtgagccttattagggaaggggaagggtgctcctggaggagggaccggcagaggcaaaggcctggtttgctggaggaactgagagaagggtgacattgacgcccccgcaaagggggaagagtgtgggaggcagctgcctggaggcctcactgagcagctgggaccaaatcccatggggccctgggggaggggagacgcaggggaagcgggcttaaagtggacttgggagaggcccgccagtggaagaggggtgggggtgggggtgccaggtcctggtggggcgtggccagagctcatttctgggaagatgtcagctcttcccagagagaggcagtgatggggcagggcgtggtggagccctgcctggtatggtacctcctccaggtagccctccttgctacctcttagtccactgcctggacccttcctgactccctctcttaaaagtgtcctggccaggcatggtggcttacgcctgtcatcccagcactttgggaagctgaggcaggcggatcaccagaagtcgggagtttgagaacagcctggccaacatagtcacaccccgtctctactaaaaatacaaaaattagggccggatgcagtgtctcactcctgtcatcctagcgctttgggagggtgaggtgggtggctcacctgaggtcaggagttcgagaccagcctgaccaacctggttagcggggcgtggtggcacacgcctgtaatcccagctactctggagcctgaggcaggagaatcacttgaacccgggaggcagaggttgcagttacccgagatcgcgtcactgcactccagcctgggcgacaaaagcaaaactccgtctcaaaaaaaaaaaaaaaaaattattcgggcgtggtggtgggtgcctgtaatcccagctactcgagaggataaggcaggagaatcgcttgaacctgggaggtgaaggttgcagtgagctgagatggcctgggcaacaaagtgagactgtctcaaaataaataaataaggccgggcgcagcggctcaacgcctgtaatcttagcactttgggaacacctgaggtcaggagtttgagaccagcctggccaacatggtgaaaccccgtctctactaaaaatacaaaaactagctggacgtggtggcgggcgcttgtaatgccagctactcaggggactgaggcaggagaatcacttgaactcgggagatggaggttgcagtgagccgagatcgcaccattgcactccaggctgggggacaaaagcgagacttcatctcaaaataaataaataaataaataaataaataaataaataaataaataaagtgtcgtcctgtccaccagcacatcttcctgttgtatttccttttaatccatagccctagcagactcttacttgtttatatgtttatatgtcaatatgtttatattgattcccccaactgtgagcccatgagagctgcaccctctccatcttggttgtttctgggtgcccgctgcccaggacaggacccagtacctgtacccacacaccaggttcttgggaaatgttggttgtgccccagcttggcagcactgctgggtgacctcgggaatgttccttaacctctctgggcttctcctcttccccagtctcagaaataagaaagttggcctgaacctccaggaagagcagggagccttgggctgttttggcaactggacccctgagttttcttccctggcctgttcggccccaggcactccagacaggcctgacctatgtcatcctgtcctccccaccccctacagcatcctttgggatctgggcccagggcaggtgtgagctgtggtaccagcacacccatgtcaagtcctgcctctgacgtgtgtttgctgtgtgacttccaagagtagcttgctttctctgagctctgtttcccctggcccaggcttgggagtggagtgtctgggggagtgtggatgcagttcagacctcacctgacaggtgtggatagtaccagggccagggcccccaagaagctcccaggctggagggggagggggcaatgcctaacataacatcccagtcctgggggatcagcactggcttggaaggaaaaccagatgggttttcaggagcctgggaagctagctggagggcttcttgaaggagaggaccacataggaactaagagctaaaggtgggaaggaaatctgggatgccagaaggaggacttcctggaggaggggaccacataggaactaagagctaaaggtgggacgggagcctgggaggccagaaggagggcttcctggaggaggggaccacaagagctaaaggtgggaaaggagcctgggaggccagatggagggcttcctggaggaagggaccataagagctaaagttgggaaaggagcctgggaggccagatggagggcttcctggaggaggggaccaaacaggaactaagagctcaaggtaggaaagttaccagtcagatgcaccctgaggtggaacggcttttgtgccccctgcattgaggtgggtagagagaggtgaggacaggaatgtagggagggccggaccccataagcatgatgggctgctgagacaggtttgcagtttttaccaagagtgctggggagtctggggagtgtttcaagctggagaaaaaggtgagcagtttctgtttgaaaccccactgtgggtcccagttaaacattctggaattgctacacacatgcacttcaatggaacagctgagcacgtgaaggtgataggacaggcaagcctcaaaattggggcttagtctgagagggttcttggcttcacccaggaaggaatttgagggcaagtcaattgtgttaaacagcaacttttctttttcttttttcctttcttttttttttaagatagggtctcactctcatgcccatgttggagtgcagtgccatgatcttggctcattgcagcctccaggagtcctcccacctcagcctcctgagaagcttggaccacaggcacagtccaccatgcccacctaattttttttttgagatggggtcgtcttgctctgtcacccaggctggagtgcagtggcatgatctccgctcactgctccctctgcctcctgggctcaagggatcctcccacctcagcctcccaagtagctgggtctacaggcacaagccatggagcccagctaattttttgtatttttggcacaggcagggtttcaccattttgcccaggctggtctcaaactcctgagctcacgtgatcttcccacctgggcctcacaaagtgccaggattgcaggtttgagccaccgcacctggcctaatttttgtattttttttttttttttttttttgtagagatggggttcggccatgttgcccaggctggtaaacagcaacattttcttcttcttctttttttctgagatggagtttagctcttggagtgtgatggcatgatcttggctcactgcaacctctgcctcctgggttcaagcaattctcctgcctcatccttccaagtagctgggattacaggtgcctgcccccacacccagctaatttttttgttcttagtagagatggggcttcatcatattggccagaatggtcttgaactcctgacctcaggtgatccgcccatctcagcctcccaaagtgctgggattataggtgtgagccaccatgcctggccttttctttctttctttttttttttttttagacagggtctcgccttgtcacccagactggagtgcagtggcaccatctcggctcattacaacctccacctcccagtatcaagtaaatctcgtgcctcagcctctccagtagctgggactacaggtgcccaccgccaggtctggtctggctttttttttttttttttttttgagacagagtctcgctgttgcccaggctggagtgcagtggtgtgatgatagctcactgcagcctccaactccctgactcaagcaatcctccagcctcagcctcccgaatagctgggattataggcatgagccaccatgcccagctaatttctgtatttttagtacagacagggtttctccatgttggccaggctggtctcgaactcttgacctcaggtgatccacccatttcagcctcccaaagtgctgggattacaccgcgcttggccctaaacagcggcatttactgaaatggccgtgtagagcagcatcagaggtgctgttccttgctgagcaagaccactgtgcataggcagtccatccagaatagtagctcacaggcacagctgcactcatatgtatacccacttttaattatatgcaaatgaaggccaggcgtggtggctcaagtctgtaatcccagcgctttgagaggctgaggcgggtgggtcacctaaggtcaggagtttgagaccagcctggccaacatggtgaaaccccgtgtctactaaaaatacaaaaattagccaggcatggtggtgtgcgcctgtaatcccagctactcaggaggctgagacaggagaatcgcttgaacccaggaggcagaggttgcggtgcgctgagattatgccactgcactccagcctgggcaacagagcaagataccatctcaaaaaaaaaaaaaaaaaaaaaaaaaaaaaatatatatatatatatatatatatatatatgtatatatatgcaaattaaggggcagtgtatgcagaaacttccaggaaaagggtgacaacttctgagtcatcagggttgttgccatggaaaagggtggtaacttctgcatgttgtcatggcaatggtaaactgacatggcacaccagtgggcatgtcttaaggaaagccccttccctgggggtctgttttataatagctagtcctcaatttggtccaatgtcgcagccccacctctggagttgagtcctgcctcctactttggagggctgacagtgggagccaggtttctcagggataaagtagaagatcacagacaggcaaggggaggaggctgagctcatgttcaacccaatatagatagttacagcaaaatatgtacagatatgtgtatatacatatatacacacatacagctccctgctctgtctgcagacagggcctccaagacacgtcaccccagtaacaagtacacattggccgggtgtggtggtttatgcctgtgatcccagtacattgggaggccgaggcaggaggataacctgaggtcatgagttcacgaccagcctggccaatatggtgaaaccccgtctctgctaaaaatataaaacttagctgggtgtggtcgtgggcgcctgtaatcccagctactaaggaggctgaggcaggagaattgcttgaacctgggaagcggaggttgttgcagtgagccgagatcacgcaactgcactccagcctggcaacagagcgagactctgtctcaagaaaacaaagaaacaaaaaacaaacaaacaaaacaaaaactaaaaaaagcccccaaacctgacagatgccattcggccaggaaatcaaggtcaacaccagcagagtaagtcatgttgacagtttgtacctttgatatggtgtgatgagatgggtgcttcacctctgtggtcttccttccccaaatccattaccctcatttaactgtgagaaagacatcagagaaacctcaatggagggacattctgtagaacacctgaccaccattcctcaaaactgtccccgaaaacaagacagtttgacaaaccgtcacaccccagaacagcctaaggagacatgaggagtaagtgtcatgtaagattctaggacagaaaaaagacattgcaaccaatggccataccagtggaaggtgataatcatgtgggaggcgggccgggcgcactggcccactcctgtaatcccagcaccttggaaggccgaggcaggcagatcacctgaggtcaggagtttgagaccagcctggccaacatgacgaaaccccatttctactaaaaatacaaaaattagctgggtgtggtggtgggtgcctgtaatcccagctactcggaaggctgaggcaggagaattgcttgaacctgggaggcggaggttgcagtgagccgagatagtgccattgcactccagcctggccaacagtgagactctgtctcaaaaaaaaaaaaaagaaaaagaaaaagaaaaaggaaaaagacactgtaacaaatggacataccaatggaaggcgttaatcacgggggaagcaggccaggtacagtggctcacgcctataatcccagcactttgggaggatgagcggggaggatggagtgagctcaggagttcaagaccagcctaggcaacatggtgaaactccgtctgtacaaaaaaatacaaaaattagctggacgtggtggtgcgtgcctgtaatcccggctacttgggacactgaggtgggaggattgcttgagcccgggaggcagagcttgcagtgagctgagatggcactactgcacttcagcctaggtgacaagagcaagaccccgtctcaccaaataaataaattaataataataataataataggccgggtgcagtggcttacacctgtaatcccaacactttgggaggccgaggtgggcggatcatgaggtcaggagatcaagaccatcctggctaacacggtgaaaccccgtctctactaaaaatacaaaaaattagccgggtgtggtggcgggtgcctgtagtcccagctacttgggaggctgagaatggcgtgaacctgggaggcagagcttgcagtgagccaagatcatgccactgcactccagcctgggtgacagagcgagactctgtctcaaataataataataataataataataatagaccaggcacagtggctcatgactgttaatcccagcactttgggtggctgaggtgggaggattgctttagcccgggggtttgataccagcctgggcaacatagggacaccctgtctctattaaaaaaaaaaaattaaagaaaaaaataataggagaagctgggtgttgggtatacaggaactctctgtactctcttcacaataattctaaaactgctctaaaataaaaggtttatttggaaataaaaggaactggccagtttcagtgcttcacgcctgttgtcccagcattttggaaggctgaggtagggggatcgcttcagcctgggagtttgaggctgcagtgagctatgatcacaccactgcactccagcctgggcaactgagcaagacctcgtctctaaacaaagaaagaaagaaaagaaagaacaactacagttgccttggagaatagggattgtctagggctgggatggagggaacaagaaacacaaataagaaaccgagttggcatccaggctgaagacaattgggtcttcgctgggaccactatggggtgtaggaaaatggacaatttggaactgtttcagagacactgaatccacgggatgaaatgctggtaatgaagggaagagaagatccttagggcctcccaagcttctggtctgtgctcctgggctgccctgactgagcctgggaggctggtggaggggcaagaaaatcagccgggtgccctgtccctaagcagagggtaggatgggggactggcgggtgttgtgtaagtttatattttctttttctttgtttttgtttgtttgtttgtttgttttttaagacgaagtctcactcttgtcgcccaggctggagtgcagtgatgtgatctcggctcactgcaacctccgcctctcggattcaagtgattctcctgcctcggcctcccaagtagctgagattacaggcgcctgccaccatgcccagctaatttttgtatttttagtagagacagggtttcaccatgttggtcaggctggtctcgaactcctaacctcaagcgatcgagttcgaactccaaaaaagaactatcatatggcatatgaggggatgacctcctctgcaaggtgccggatcccggggctgccctaggccggctgcagacttgctgtgtggcctccaagcaagatcttgccctctctgagcctcagatttcccatttgtaaaataaagaccaataatgtccaggttacaggcttgtggggggtcatcaactgagccctgcctgttcgctcaataaacgttggtcgctccttactccttaccactgagtctcagggcgaaagagtggcgcctgtctctttaaattatgcaaatagactgcgggtggcgtaagggggggaacataaaaaggagcctagtcttcggctggaccaatcagcgcgctgagctggcggagctgggcgcctaaatggcccaatggggggccgcgcgggatcagagcccgccctgcctcctggcgccgtcgcgggggtggggactttctaggccacgccccgggggcggagcccgccggcagccgcgccgcagccgcggagggaggggcggggcgggctccggtgtcagcgaccaagccgcaggtggcggcgagcgcggggctcggcccgagctcaggaggtgagtgttgccccccggaaccccctgggataccctggcccgcgcagcctcccacgcgcaccgtgccctgcagccccggcggctgcggagggcaaaggcgcggcgggacgcgagggatggagagcagggggttggggctacgcggtgggcgccccggcttccccctccaagtggtaattgggggtccgcaggcgaaaatggggaccgctccccaaatcccccgtctcctggcctagaaccgagcgtgcacgggggcggcgacgacgcgagacccctccccaaattcttttattctaagcctaggtctgggttctggggctgcaaagatgggggcgccgctccccttccagcctggaaccctgggcggtggctgagatggggaccacccgcagattccctcttcccagctccggcctgcagaccaccggggaccgagacgagggaccccttcccttttcctccactgtgaacccctatccaggcctggtggctggaggagctggggtgtcacctggcccctcctctaatctgccccatcccagtcctccaccttaaggatggggtggggggcgtttcactggcatcttctgtggggaccccaaggttggaattttggggaggaggtcactgtggggtcccctgcctggcacggtttatccaggccaggccttgaagggcctggagcctggacttggggggggggtccctcttttactgaggggcggggtgtacagctagcatctgtttctggggattaaaataaatcgaggtaaattaggatcttgccagaggctggctgtgagtggggtgcggaggaggcttggggggtgggggacccctccatctgccttggatcccccgagtcacctgccccagctgcactggggaccaggaggcagtgtcgaatggacctgcttcactggtgaccttgggcaggtgacagcacctttctgaacctcggtttcctcttttgaaaattgaggttgggagcttcggaccctgcattttacagattctgaactcacccagcccacattttgtccaatggtgattcactcttttgcttaacatgtgggtggtttggggtcaagacagcattgggtttggagaccctcccacagtgccttgctatcctctcagcctcagtttactgcactgcaaaatgggttgatgatgacactctgatattggggctgagggcatggggacagggagtaaaacataggaccaagctgcaatggctgggatggggcatcgccaccctggtctcaccattggggccacttagggcacaccctgacccacataccatcacccacgccaggggtgaacctgttctcgggcgaggtcctgggcaggagggggtgggagttgccaggccagctcattccctgtcccttggagcgccctcccagtggtgggcatggggctgggagtctgacacccccaggtttgaatttgcctctacctgtgtgtgtgtttttcccttggtgcctttgtttgttcttctgtgaaatgggctgaattcctctgggaagatgggaggagtctgtgggaggaggaagctctgtaaatacagacatgattattataatattaatgacagtattagtgctctttaaatcgggtcacagctgaccaggaggagggaggggaagggggagtctatcaaaggcattgcctgaggagactccagcacctgggaaagttgggtacacagtaggcattcaatagatgtttgccaaatgaagtgaggaagagggaggggacccatggggaggacagaaaatttctgagaatccctggctcagattcccacttggtggcccgagtcactgtgtgacctggggcacgtgtctcagtttccccatcgtggtgctggttgagataagatactgccttgaggtgtggtgacgagaatcaagccagattgtctgtgatcgcagcccaggtggcgaggccaagaggggagacatgacatagtgggtcattgaaacagcatggtacctgcttgaaccaagtgactggtccgtgggaaggatgagaaaacccttgctactggccctactgtacatacactggggtccaagagagagggaaatgtgagatcctgtttcccaggatcctggaagccagatcgtggaaggtcaggagtggcccaaggtcatcaggcaagacgtcagcggctccggacacccagccaggcaccactcgattcccaggatgggagctcgggtcttgcctttgttgctgatgtggttcctgctttgttttatctgttctggggctgctcacatgtctcagccccaggtttgcaagacttggtgccgggaaggcaggatggggacctctgagtcagctggcaatgtgctgtgtaaccttgggcaagtctccggccatctctgggctttgtgctggtactgtacaggctgggagacttgggttctagcagggctgacttctccatcagacccaaaatgcccagtgtctcaggctcacagtgcttttaggggtccctaggttgatgttttcacttcttttaaaatccaaagggaaaaaaatgaactcttgggttgaaggaaacatttttgtgtataatattaatatatttgtctttatgtcaatgtagttgtaaaatacagttttgttttgttttgtttttgagacagagtctctctctgtcacccaggctggagtgcagtggctcgatctccgctcactgcaacctccatctcctgggttcaagcgattctcctgcctcagcctcccgagtagctgggattacaggcatatgccaccccacccagctaacttttgtatttttagtagagacggggttttaccatgttgcccaggctgttctcgcactcctgggctcaagcaatccacctgcctcggcctcccaaagtgctgggattccaggcatcagccaccacctaaaatataattttaaatttcttttgtagtgaaggaaagcgctcatgaatgcaaaaatgtcttcccctttcttttcttttttttttttttttgagatggagtctcgctctgtcgccaggctggagtgcagtggcgcaatctcggctcactgcaacctctggctcactgcaacctccacctcccgggttcaagtgattctcctgcctcagcctcctgagtagctgggactacaggcatgggccaccacgcccagctaatttttgtatttttagtagagacggggtttcaccgtgttggccaggatagtgtcaacctcttgacctcgtgatccacccaccttggcctctcaaagtgctgggattacaggcgtgagccaccgcgcctggccatgtcttcccctttctgagcgcatttccctctctgagcctcagtttgcccagtctgtgaagtgggtatcggcctacctcaggatggcaagatgttgaatgcctgggccagggttggtgctcagttatttcccaattgccatgattaatatttgttcggtaagaacagctccaggttcaggccggggggctccaggttcaagcgcctcttgtttactcacccatggcctgtgtggttccagggaggtcccatgggtgctgatcgggcgggggaggaaaggtggcggttggatggtaggcggggcggggtgagcttcctgtcccccccccaacccatgcacacaagcctccaacttggtgctgacggaagtggcctcgtggctgtctcctggcgcctgccccgtcagacaggggccccatcccactcgctaccctgtccggtgagtttgagccctggccagtagatacccatcatctcgccttggcccccctcaggaacagaggggaggcccccctgcccggagcctgggtttcaggagaagtagcaggtgtcacttcctgggctggccaaagcctgcatggggccacccgttgccctgccccccgtcccccattccagctgtgagtggtggtttgggttaggggggcggcaaggggagcttggaaacccagagagccacgcgtgatggtttcaaacaggaggtcattggcagacagaccaggggcaaaatcacagtcagccgggaccaatgattgatctctctgtgcctcggtttccttcataaagttggggttgcctctgagggcatggcatgaagattggatgagcagatgcgtgtgaatagttgggtacagggtcgcacacatactggtgctccatgtgtatctgtctgccagaggtggggtgaggcaatctaattgaaactgtgaaaacagtagtgagattcttggtttctggggaacttgggctccttggttcctgggatcttctagaacaatgttggccatccaatacagcagccatcagccccatgtagctactgagccttggaagagaggctggcacagctgaggagctgggcatataattgtatgtatgtatgtatgtatgtatgtatgtatttaattattatttttttaagacagaatctcactctttcaaccaggttggagtgcagtggggcaatcttggctcactacaacctccgcctcccaggttcaagtgattctcctgcctcatcctcccaagtagctgggactacaggtgtgtgccaccacgccctgctgatttttatattttttggtagagatggggtttcaccatgttggccaggcaggtctcgaactcctgacctcaagtgatccacccacctcggcctcccaaagtgctgggattacaggcgtgagccactgcgcccagccaattgtatttaattttacttggtttaacattaatacaaaaattaatacaaaaattaaggccaggggttgtggctcatggctgtaatcccagcactttgggggtcccaggcaggaggatggcttgagctcaggagttcgagactggcctgggccacactagtgagacctagtctctacaaaaaaaaaaaaaaaaatttatttttaattagttagacatgtagtcccagctactcgggtggctgagatgggaggatcacttgagcctgggaagtcgaggctgccatgagctgtgatcatgccactgcacactccagcctgggtgacagagcaagaacctgtctccagaaaaaataaaaaaataaaaaaaacttaatacaaaaattattcaggcgtgagcctgtagtctcagctactcgggaggctactattcaaggctcccttgagcctgggaggtggaggctgcagtgagctatgatcgcaccactgcactccagcctgggcaacagagcgagaccctgtctccaaaaaaaaaaaaaattaagtcaccacatggggctagtggttcccatgccagtcagcacagctctaagagatttggagatgcttagggtcctggtcatggacagaagctaagaaatgatatggaaatttagggcttttcccctagggatgtcagtgtagcatgctcaccaccctacccctgccaccaaactaggtttcctaagggggtgtggtggggactgaagtttttcaggggccctgtcattaaccagtgcagggttgggaatgtttgttgaaacaaataattccttgcccagtgaactcctattcatgctttaaaaccccaactcccatgagccctcctttagtccaggttcttttggaccttgtccctccatctggcccagccctgaccatgcaggacggtgatatctgtgtccagctctgtctctctagactggggactcctgcagggccaggcccgaggctgaatcaactcagggaccctgacattgttctagtctgggtgagcaagtaggaggtcttgggtgactcacagaagtcccgggattggaggctcaatgataatgggtccaattaaactaactaactttctttctttttgagacagggtcttactctgtcgcccaggctggagtgcagtggcgccatctcagctcactgcaacctccgcctcccaggttcaagcgattctcctgtctcagcctcccaagtagctgggattacaggtgcccgccaccacacctggctaatttttgtatttttaatagagacagggtttcaccactttggccaggctggtctcaaactcctgacctcaagtgatctgcccgcctcggtcccccaaagtgctgggattacaggcgtgagccaccacttctagcctaaactaactttcaagattaggtaaactgaggcacagagaggggcagccttgcccaaggtcttgctcagtcctttcctggggaggccccgggagcttccccatcctgtggtcacgggtccctgtcactcctgccactgttcctacgaggctcccagctgctaccgagctgcctgtggggtcatgaattatgcatgaggcctgcaggctccagtgacaagcctggcctctagaacatgccaaggacactgcctgtccgtcccctgccgggcggcctgacccagcctcttgtgcagagacacctggggctccccggcaagatcccttctaagcattccttcttattttgcagatggggaaactgaggcacggagctggacagtgactcagacaccaggtgaacactggcttttgagggcagggttgggactcgtgggggcagcaatgccagctgggtcatcacagtgaggagtgagctctgactcccaggagggtacataaggtgaggactgtcctagaggaatcagaagatcccaggggaccctcagggatacttcagggaccccaacccccatgtggctgatcacagcccctgcatctatttctcttcaaacccttttcctgcaggagctgcctggagtggagctgagagctcaggtctgggctcagccagtccagagtgcaaatctactgtcccttcctagctgtgtgatcttggcaagtgacttcccctctgggggaggggagggctcagttttcccatctgtgaagtggatcagagctttcctgtcaaggttaggggtcatccagcactgctcctacccactgctatgaactcttatacatgcctaaaaaccccacattccatgccccctcctccaatctagactccctcagctcttgtccctccacctagtccagttctgactctgtggaattgggggcatctgtgtcttgttctgtccccctctactggagctacttgggaccagcactggggctgaattatctcaggggtcctggcatgctcttagcattggagctttcagttcctccttcatcctttctctccttcctctacagggagggactttccccccaccaagcccacactggcaatgactctgtagctcaaacttgcctctctcttcagacaggcactggacggggcctgcaggggtctccacagagaccatcaggatgtcgtattttggggagcatttttgggtaagacccactcttatttaggcgggggatgctggcagggctgtggggacttttatggagatgggaggactgggtgagttgcggttacagccttggacaggtagaggatctgcaagggatggaagttaaagtgggaagagtcaggctgggtttgaatccacacccaccccagacctcacaggccttacaaccttgggcaagtcatagcttgtgtcatagggagaccaagggccagagtgggaacgtctaggcaacctgaagttgccccatgaaaaagtgcagagtcagtgctcaaacccagggccaaactgaacttccaggacccagggtcattccagccagggaacttccacccccttcccatcctggagaattggggggttttcctgacctggcgtctcatggcctgtgcacccctccactgtccaggctggagatcacctcctgtagcccaagggctgctgagtgagacagagttgtttttattcattcatttcctctctccctgccactgtgacctcatccccagccagccctaggagatgctggggtctccaagagaatccatcccagccccagccccaagggaggagtccccagtctgggggacccagagccagcttagacaccttcagccctgcaggaccagggctgaacccagccttgggggtcctagagtaggaaccaggacacagaatcgtgtttgctgtgagaaagcctgggcaaaagaccagagatgtgacattgagtggcaagttcagggaacagggactcctcctgcagagccaggctaacagggtgccacagaggatgggtgaacaggggagggcccaggagtcagggaaggaccaggtcagaaagccccttccccagttgcaggccctgagcttgcagtgaggaagcctgttgctaggcgactggttgcccctggcaacaagccccactcctgcccttgctccctccccagctggggctcctcttgaaagcacttgctttcttaaaggggccgcactcccttgccacctgcaggggtgtgacctccgccctctctccaaaggtcagactccccgatttgcccctgaaaggctgtgtgactccagtgaggggctacccctttctgagctccttttagtactgccgtgtaatggaggtgaccatttgaggatcaaaagtcacctgcattttggaaccccgacagtggcacctacatttattttaaatcctttttaattgtgtgaggcgtgcaggctcgctgcagaaaattcagatcagcaaagagaaaatagaaaccacccccgacttccccacctcacccaaagatatcctggtagagaatggttaagagctttgagttcaggattcgaattgactctgctggaagcccttgagcaaatgactttgcctgcccgaacctctgtttccccatctgggaaaaagggatgaaattcctgcaccgccactcccaccccatgcaccccacacacccccagactcagggaggcctcctgtgacatctgtcatcagttgctagtattgaagccgccatagaagcctggttctttgctgggtggtgctggggagattaagccaaacagggatgccccagtctcattgcgccagggcagggccgaagcatgaagtgtactagggagccatgggggaagtgtgagcaggagagggacataaacaagctctgttacaaagaccacactcttggctgggcgcagtggctcatgcctgtaatcccagcactttgggaggccgagggaggcggatcacctgaggtcaggaattggagaccagcctggccaacatggcaagaccccatctctactaaaaatacaaaaattagccgggcatagtagcatgagcctgtagtcccagctactcgagaggctaaggcaggagaattgcttgaacccgggaggtggaagtcgcagtgagatcgcgccactgcactccagcctgggtgatggagtgagactccgtctaaaaaaaaaaaaaaaaaaaaaagaccacattttggctggcacagaggccaagtctgaagtctagaagttctggtgggagagacagacctgagacagcccctcctaggaccctcggctgccagcccagtccaagagaggcagacgctgctgggggtttgccaggtctgggaaacgggccagcagttggctctgagtcagacccagatgctgctctgggcggtggtgcctggtgcagcctcacccgaggatctcctggggccagcactgtgccagcctcatcccagcaagacccttgggagttgggtgctgttgttgtccccatttgtcacacaaggaaggaaactgaggccagagagacgaagtcaccaacccaaagtgaccctgtacgtataaggagattggacacttgaactttgaaaatataattccaaacacaagaagagaaaatataggtggagcgtggtagctcacgtctgtaatccaaacactttgagaagctgagatggcggatcgcctgagcccaggactttgagaccagcctgggcaacatagcaagaccccgtctctactaaaaatacaaaaaattagctgggtgtggtggcgcgcacctgtggtcccagctacttgggaggctgaggtgggaggatcgcttgagcctgggaggcagaggtttcagtgagccaagatcataccactggactccagcctgggcgacagagcaagaccctgtctcaaaaaaaaaaaaaaaaaaaagccgggtgcggtggctcacacctgtaatcccagcatttgggaggccgaggcaggcggatcacaaggtcaggagatcgagaccatcctggctaacacagtgaaaccccgtctctactaaaaatacaaaaaattagccgggtatggtggcgggcacctgtagtcccagctattgaggaggctgaggcaggagaatggcgtgaacccaggagacagagcttgcagtgagccaagatcgcatcactgcactccaacctgggtgacagagtgagactccgtctcaaaaaaaaaaaagagaaaacgtattcctggcgagctggagggagcaacagtgaagtgggggagggggttgagcagggttagggaagtttctagagcaggtggcaatgatccttgggaagtggaaggatgtggatgggtggaaggagatgcaagctggagagctgatggcgggaatagcctggacaaaatgtggtggtggaaaggcactgcctgtctttgctatttgctgttttgtgggtgaggctaggaagaagctaggagatgaggctggagcagcaattccaggccatggacttggacttcagcatctggtgggcaatagggacccattgatgattctagaatgaagtgtgaccattgggagatttgggcttgaggctgacctgggtctgccccagtcttggcttcggtgtctccattggtgcagcaggaaacgttacctagcagtgacttctggctttaaccttcaggcttctggccaagtgtggtgactcacgcctgtaatctcagcactttgggaggctgagatgggaggattgcttgagtccaggagttcgagaccaaccttggtaacatagtaaggccgtatctctactaaaaataaaaaaaactagccaggcctggtgtcacatggctgtggttccagctacttgggaggctggggtgggaggatctcttgagcccaggaatttgaggctgcagtgagccatgattgtgccgctgcactccagctggggagacagagcgagaccctgtctcaaacatagaaaaatatgtataacattcaagcttccgggtacctgggagggtgaacctggtaggttggaggagggcacaggaaactaccatttatggaaaacccgccaaatgctgccagagggatggcttcactgatgtgtgttgggacttaaatggcatcagatccctccacaagccttctcttccagtgttattataagacctgatttggtgctaaaatgtccccagttccctcagaccccagctgattaccttttttttttttttgagacagagtcttgctctgtcagccaggctggagtgcagtggcgggatctcagctcactgcaacctctgcctccctgcttcaagcaattctcccgcctcagcctcccgagtacttgggactacaggcgcccactgccacgtctggctaatttttgtatctttagtagagacggggtttcaccatgttggccagtctggtcttgaactcttgacctcgagtgatttgcccgcctcagcctcctgaagtgctgggattacacgcatgagacaccacacccatctagtcattgattttaaagttgtaatggtgagttttaagtccaaatctaaaggtgtccaattccaacagcgggcgcagaggaccaggtctccaaggggtggagagaagcgggatcagaaggtgtgtatgaggccgggcgtggtggttcacgcctgtaatcccagcactttgggaggccgaggcaggcagatcagttgaggtcaggagttcaagaccagcttgaccaacatggtgaaaccctgtctatactaaaaatacaaaaatcagccaggtgtggtggcacacgcctgttaaaaaaaaaatcctcatgtttaatctatattggtcttgcttttagccttttcctcagttctattcatattgtttattattttttgttttctgtagatggtcatataatctggtctcaattatttttcttaccttactgcatttgccaacacctctacatcagcattaaatattagccatgatttgaggcattcctgcctcatcctgaaatatgttgtgtctcctgttttgccatctttttttttttttttgcattgggggacagagtcttgctatgtcacccaggctggagtgcaatggcacgatctcagctcactacaacctctgcctcccgggttcaagcgattctcctgcctcagcctccgaatagctggggttataggcatgtgccaccacgcctggctaatttttgtatttttagtagagacggggtttcaccatgttggccagtctggtctcgaactcctgacctcagataatctgcctgcctcggcttcccaaagtgctgggactacaggtgtgaggcaccgcgcccggcctgattaccatttttaatggacagcttagtagtgttcaggcatgatgcccttcccaggtgacagaatctggccggcgttaagatatagttgttgcctcattttttcctactcctttcatgcggcagagggtcccaattttccattgagagtggcagaaaaagttgccctttaacataaatgtctttggggaagaagcataagcaaatttaaaacaaatgctaactattaataactaatgttacgaattagcaaaaactagagtggcctttggggctttggggagcattgacatggattatcttgctgcttgtatcatctccatgtaagaggcagatgtctcccaggctgtagtgtagtgacatgattttggctcattgtaacctccgcctcccgggttcaagtgattctcctgcctcagcttcctgagtagctgggattacaggcacctgccaccatgcttggctaattttgcatttttagtaaacacggggtttcaccattttggccaggctggtctcgaactcaagacctcaagtgatctgcctgcctcagcctcccaaagtgctgggattacaggggtgagccaccgcgcctaacctccctgccccatcttaatgaggagctcctaaaagctcagagggggcagtgacttgcctgggtcacacagtgcagccctggcctcccccaccatgacaaccccagaaattggagtaaagagattttgtgaaggcattcgcaggcaccagggtagaaatactcagttcccagtggcactaacaggtaacagcagaatcatttgtttatttattcaacgaactcaaatgccctttctgtctctcattctgtgctgggctttggtgggtcctgggagagaactcaaacctggaccctaatttgggttctcataggcggaatttccatgttgacaagaacagaaaacacaactacagtgacttaagcaacggggactgtattggcttataagatcaaatgattatgggggaatgtggctttcagggttggtttgatccagcaactcaatttaacacacttttttttttttgtagctagtataaatgggatcactttcttgatttcttttcagctatattttattaatggtgtatagaaacgctactgattttcatgttgatatttgtattttgcaatttaactgaatttgtttatcagttctaggagttttttggtggtgtgtttaggccttcctatacataagttcatgttgcaaagagagacaatttgacttcttttcatgtatatacatatatatatatatatatatacacacacacttcccccccgccctgagacggagtcttcctctgttgcccagagctggagtgcaatggcgtgatctcggctcactgcaacctctgcctcccacgttcaagcaattctcctgcctcggcctcccaagtagctgggattacaggggtgcgccaccatgcctggctaatttttgtatttttagtagagacagggtttctccatgctggccaggctgatcccaaactcctgacctcatggtccgcccgcctcagcctcccaaggtgctaggattacaggcgtgacccactccaatttatttttatttttatttcattcattcattcattcattcattcatttattttgagacagtcttgctctgatacccaggctggagtgcagtggtaggatctcagctcactgcaacctctgcctcctgggctcaagcaatcctcctgcctcagtctcccaagtagctgggattacaggcacgcgccaccacgcctggctaatttttgtatttttagtagagacggagttttgccatgttggccaggctggtctcgaactcctgacctcaagtgaaccacccaccttggcttctcaaagtgttgggattacgggcgtgagccaccgtgcccagctcaacacacttttttttttttttaaatataaaagccctctggttcagcttctttctaaggttcacggtttccatttgacttccagtatcccctgtggccacataattcctcatttatggaaagacacaaagagaaaaggggaggagactgagacagaaacggcagagagactcagaaaaacggagagaaagacagagacacaaagacagaaggagacaaagacacagaacaaatgagattcctccccagcaactataggacaaaaagaaaatcccaggcttctctctgattggacaaatttaaggtccatagacaatccctatggcccaggggaaatgcagcaagctgattcgctcaggcccgaacaagtccctacagccaaggggatggacttctgctccttggccacgcccccgttgctaagcaactatgatgttctctccatcctttctcaatctctattcccatcccctgcagggcgagaaaaatcatggctttgaggtcctgtaccacagcgtgaagcaggggcccatctccaccaaggagctggcggacttcatccgggagaggtgaggtccccaagccccatccaccagaggccacgcccaccatcctgtagtcacgcccacctaatggctacgccctgcatggtcaggggctagaaccctggggattccaggaaccagaggggctcgaaaatcctggaaatgaccgattctcaacccggtcaggcccatatctccttttaaacaacaatcacctgatttcgaaagctcccctcctcaaaagaggatgatataacctactcaaggttggaatttttttttttggagacaagatcttgctttgttgcccaggctagagtgcagtgacccaatcatagctcactgcagcctcgaactcctgagttcaagagatcctcctacctcagctcccgagtagctgggactataggcatgtaccaccacatctggcttttttttttttttttttttttaaacagagttttgctcttgttgcccaggctagagtgcaatggtgcagtctcggctcactgtaacctctgcctcccgggttccagcaattctcctgcctcagcctcccaagtagctgagactacaggtgcctgccaccacgtctggctaatttttttatttttagtagagacgaggtttcactatgttggccaggcgggtctcaaactcctgacctcaggcgatccgcccgcctcagcctccaaaagtggtggaattacagatgtaagccactgcactctgcctttttttttttttttctttttggagacagagtctcactttgttgcccagggtgatctgatcatagctcactgcagcctcgacctaccgggcccaagcgatcctcccacctcaggatcctgagtagctgggactacaggcatgcaccaccacacctatctaagttaaaaaaaattttttttgtagagaaggagtctcattatattgcccagggtggtctcgaacccctgggttccagtgatcctcctgcctcggcctcccaaagtgctgggattacaggcatgagtcaccatgcccagcctactactgttgttaataaaatatattacgtaagaaaaaatcttctatgaattttcaaaacatccctcagagtgttgtgtcatccccccattatggaaagccactgctaaggtgtttgagatggggaaactgaggcccagaggagcagtgcctctctcaagggtgtctgaaagcttcttcatctttttttttttttgcgatggagtcttgctttgtcacccaagctggagtgcagtggcacgatctcagctcaccgcaacctccacctcctaggttcaagcgattttcatgcctcaacttccccagtagctgggaattacaggcatgcaccaccacacctggctaatttttgtatttttagtagagacagggtttcaccaagttggccaggctggtcttgaactcctaacctcaggtgatccgtccgcctcggcctcccagagtgctgggattacaggcgtgaaccactgcgcccgggcagtttctccatctttacctcattctcctccccagggccaccatcgaggagacctactcgaaggcgatggcgaaactctccaagctggccagcaacgggacccccatggggtgagtggggtaggggtcaccaacatggggacattgggagcctcctccttggtggacatctcttcacactcggtgcatgtagaatagagtgtcatccacctcgattatggggctatttggatagagggatgtatatcattcattcacacactagctcattcattcattccacaaatattttttgagtgccttctgtgtgccaagcaccagcagcaacccagacagataaaaccccagccaccttcatgcaatgtacatctgggctgtgtgagaagagagatgttaaatacaaacaaaaacattttttttctgaggtgaaaagtgctgggaagggggccaggtgcggtggctcatgcctgtactcccagcactttgggaggctgaagtgggcggatcaccggaggtcaggagttcaagaccagcctgggcaacatggtgaaactcctctctactaaaaatacaaaattagtcgagtgtggtggcgggtgcctgtaatcccagctactcaggaggctgagtcaggagaatcgcttgaacccaggaggcggaggttgcagtgagccgagattgtgccactgcactccagcctgggcaataagagcgaaaactctgttttgaaaaaaaaaaaaaaaaaagtgctgggaagggaatgagataggagtgtgagagatcgggcactttctctggggtgggcccgacctccctgaactgagaccttaatagaaaggggcaggccatggggatgtctgagggacagagacccgggcaagtggctcagccagtgcgaaggccctgagttgacaggcgtggcatgtttacggaagagtgaggaggctggcctggctgcagggcttgggcaacgtggaaaggaagtaggaggggagatggcagggtgaggcctcaggggcctgacacacaaatgactttgcatgaaccttgtgcccgggcgcggtggctcaagcctttaatcccagcattttgggaagctgaggtgggaggatcacttgaggccaaaagttcgagaccagcctgggcaacatggagaaacccctgtctctactaaaaatgcaaaaattagccgggcatggtggcatgtgcctgcagtcccagctatttaggaggctgaggcaggaggatggcttgaacccaggtgatggaggctgcagtgagccatgattgtaccactgcacttcagcctgggtgacagagccagaccatgcctcaaaaaaaaacaaaaataaaaacaaaacacataatgtggtcccccgatggcatttgcagttttctttgtggctgctatgaggcaaaagttctgtggggcaggcagaagtggaggcagcaggaggagaaggtggagggaggctggatggggcttctgctgagtggggcaggccaaattgactcgattggggcatgtggtgtcttagtcactcttttttttttttttttttttttttgagacagagtctcactctgtcgcccaggctggagtgcagtggcgcgatcttggctcactgcaagctccgcctcctgggttcacgccattctcctgcctcagcctcccgagtagctgggactacaggtgcccaccaccacgcccggctaattttttgtatttttagtagagacggggtttcaccatgttagccaggatgctctctcaatctcctgaccttgtgatctgcccacctcagcctcccaaagtgctgggattacaggcgtgaaccatttttttttttttttttgagatggagtctcgctgtgtcacccaggctggagtgcagtggtgtgatctcggctcgctgcaagctccacctcccgggttcaagcgattcttctgccacacccagctaatttttgtattttaagtacagacgggggtttcaccatgttgctcaggctggtctggaactcctgacctcaagtgacctgctcgactcggtctcccaaagtgctgggattaccagggcctgcgtttaaattccagctctaatgttgatttgttgaggggccttgggaggagctatagagctccctatgcctcagtttccccatctgtcacaggcccgcctcttacagctgccatggagattatatgaattagtattcattcatgtttagcagggctcagcgtgcagcacatacctgagccagtgccagcgctgtcccggggtggggtgagcctgatgaaccctgggtgtgaccttgcccgcccccaggaccttcgccccgctctgggaggtcttccgcgtctcctcggacaagctggcgctgtgccacctggaactgacacggaagttacaggatctcatcaaggacgttctccgctacggcgaggaacagctcaagacccacaagaaggtgtgtgtcgtgggcgccgcccagcggctgggtgggtgtggaacaccggcagctcacaggaccccagatcttctggggctttataacctgcggatgtccgcctccgagaattccgttaattccacaacgtcaagcccagggtcttacggacctgagcgttgttgaatttcaaacttgcaaaattccagaccaggagttagcacactgtggcccacgggccaaatcccgcccaccccccaccaatgtttgtacagctaagaagggttttttttttttctgcttgtttgtttttaagagacagggtctcactctgtcacccacatgcagtggcgtgatcagagctccctgcagcctcaaacacttgggctcaagcgaacctcctgcctcagcccccacagaatagctgggactacgttgcacgccaccatgcctggctaatttttaaaaaatgtttgggcctggcgtagtgactcatgcctataatcccagcactttgggaggctgaggcaggaggatggctggagcccaggatcctacaggagtttgagaccagcctgggcaacatagggagaccccatctttaccaaaaaaaaaaaaacacccaaaactacccaggcatgatggcacatgccggtagtcccagctactcaggaggctgaggtgggaggatcacttgagcatgggaggtcgaggctgcagtgagccatgatcatgccactgcactccagcctaggcaacagagaaagactgtctaaaaaaaaaaaaaaaaaaaacaagagagagagatgggttatcactggtttttacattattaaagggttagaaaaaaatctaaagaaaaataaaatttcaccacatgtgaaaattgtatgacagtcacatatcagtgccagtaaataaagttttattggcacagagccatgcccattgatgtgcctgtcatctgtggctgtttggcactgcagcgacagattcaagtgtttgtatcaagccaaacacatttgctatctgtccctttacagaaaacatttgccaacagctgttctaaagcattggaagttacagatattcatatttactatttttacactcttataaacctagaatcagaagaaccatcttagactcttagaattccacaatatccaaagcttataattgtagaatcatagatgcattgtctttacagagttccaaaatctgcatgtttttatgtcttgtttaaaaagggggttggtaatactttgtttttgttttgttttgttttgtttttttgagatggagacttgctctgttgcccaggctggagtgcagtgtgcacaatctcagctcactgcaatctccatctcttgggttcaagcaattctcctgcctcagcctcccaggtagttgggattacaggtgtgctggtgcacgcctggctaattttttgtatttttagtagagacagtgtttcaccatgttggccaggctggtcttgaattcctgacctcaggtgatctgcccgcctcagccttccaaagtgttgggattacaggtgtgagccaccgcgcctggctttgctgatttttaaattttttgtatagaagggatcttgctagccaggagcgatggctcatgcctgtaatcccagcactttgggaagttgaggcaggcatatcacttgaagtcaggagttccagaccagcctggccaacatggtgaaaccctgtctatactaaaaacacaaaaattagccagacgtggtggcacacacacctgtaatcccagctactcaggaggctgagacaggagaatgacttgagcctgggaggtggaggttgcagtcagttgagatcgcgacacaccactccagcccgggcaacagagtgagactctgtctcaaaaacaaaacaaggcaaaaaaaaaaaaaaggagagagagaaggggtcctgctgtgttgcccaggctggtcaaacatctaacatatctgcctcagccttccaaaatgttggcattacaggcatgggtcactgtgcctggccaggagtgaatttttaagtggtaaaagcaggccaggcgtggtgtgcatgcctgtagtcccagctacttgggaggctgagctgaggtgtgagaattgcttgagcctaagagttagagaccagtttgggcaacacagtgagaccccatctcttaaaaaaaaaagctgggcacagtgacttatgtctgtaatcccagcactttgggaggctgaggcgggcagatcacctgaagtcgggagttcaagaccagcctggccaaaatggtgaaaccctgtctctactaaaaatacaaaattagccgggcatggtggtgcatgcttgtaatcccagctacttgggaggctgaggcaggagaatcgcttaaacccgggaggcggaggttgcagggagctgagattgtgccactgcactccagcctgggtgaaagagcaagactccgcctcaaaaaaaaaaaaaaaaaaaaggcctggcacggtggctcaagcctgtaatcccagcactttgggagtccgaggcaggcagatcacgaggtcaggagatcgagaccatcctgactaacacggtgaaaccccgtctctactaaaaatacaaaagaaaaattagccgggcgtggtggcggcgcctgtagtctcagctactcaggaggctgaggcaggagaatggcgtgaacccgggaggcggagcttgcagtgagccaagatcgcgccactgcactccagcctgggtgacacagcgagacttcgtctcaaacacacacacacacacacacacacacacacacacacacacacacacacacacaaaacggtgagttaagcaacacagtctgccactgtttgtcataaaacttgggttagaacaagcatctttatccatatgcggattatttctagagaagtatcacagtaataattggggacttctaggctggagggcccatatatgggaggctttttcctggcttacctcttacaactttctgaaatatgaaccatgtgtaaatagtacttttttttaaagttaaaaatgttttgaaatgaaaaacgtacaggccgggcgtagtggctcacacctgtaatcccaacactttgggaggctgaggcaggtggattgcttgagtgtaggagtttgagaccagcctgggcaacatagcaagaccccattgctattaaaacacacacacagaggccgggcgtggtggctcacacctgtaatgccagcactttgggaggccaaggtgggcagatcacctgaggtcaggagttagagaccagcctggccaacatggtgaaaccccgtctccactaaaaatacaaaaaattatctgggtgtgatggtgagcacctgtaatctcagctacttgggaggctgaggcaggagaattgcttgaaaccgggaggcagagattgcagtgagtcgagatcgtgccactgcactccagcctggacaacaagagcgaaactctgtctaaaaaaaaccaaaccaaaacacacacacacacatagaaaaagactgtggagctgacatcacgtggagtgtttgggaggtcaggaatttcacagtctacccatgaaatcccctcctaccccgcagtgcaaggaggaagtggtgagcaccttggatgctgtgcaggtactctcgggcgtcagccagctcctgcccaagtcccgcgagaactacctgaaccgttgcatggaccaggagcggctgcggagggagagtaccagccagaaggagatggacaaggtgggctcacagtgggggggttctgaggaatttgccgcggggcggaggggctgcctgatcagagagtggaaacacatcccagagcgacggtcctggaacctgtgggtgatcacaccctgggtaccccgaggagttcacctgccaggtgatggggcctgggggaggccccctgagtatcgccctcccatccccgtttcctccctgtgctttgtaggcggagactaaaaccaagaaggcggcagagagcctgcggcgctcagtggaaaaatacaactcagcccgagctgactttgagcagaagatgctggactcagccctggtaagaaccaggcatctgtacctttaagacccacacatgcctttgccctggaggttatggactgcagaaatcccaggcagggtgtggtggctcacacctgtaatcccagcactttgggaggccgaggcgggaggatcacctgaggtcaggagtttgagaccagcctggccaacatggcgaaagcctgtctctactaaaaatacaaaattagccgggcgtagtggcaggtgcctgtaatcccagctactcaggaggctgaggcgggagaatcacttgaaccagaaggcggaggttgcagtgagccaagatcgagccattgtactccaggttaggtgatagagtggaaccctgtctcgaaaaaataaaataaattcaagcagattggaatctgaggattaggaatcagaacttttttcaagttacaagtgatagaagccttcattcaaaccgacaggtgtatataaaaaaaaaaaagaaaagaaaagaaaaaggctgggcgcggtggctcatgcctgtaatcccagcactttgggaggccgaggcaggtggatcacgaggtcaggagatcgagactatcctggctaacacggtgaaaccccctctctactaaaaatacaaaaaaattagccgggcgtggtggtgggtgcctgtagtcccagctgctcaggaggctgaggccggagaatggcgagaacccaggaggcggagcttgcagtgagccgagattgcgccactgcactccagcctgggcgacagagcgagactctgtctcaaaaaaataaaaaataaaataaaaaataaaatttaaaaaaactgacaagctcagggaactgtaaagttttatttttgagttgtggaggtttcagtcatagctgaatccatgtgctcaaatagtgctggcaggaaattgtgaatttctgcttcttttatttttttgagatgggatctctctgtcactcaggctggagtgcagtggcgtgatctcagctcactgcaacctccgcctcctgggctcaagtgattctcctgcctcagcctccctagtagttgggattacaggcacgtgccaccacacccagctaatttttgtatttttagtagaaacggtttcaccatgttgcccagactggtcttgaattcctgacctcagatgatccacctgccttggcctcccaaagtgctgggattacaggcatgatacaccacagctgaccactatttctgcttcttaagtctgtttttctctctggggacatcactcccacacagacatccccttgtgtgtgtgtgtgtgtgcatgtgtgtgcaagcatgcacatgtgtgcatcaaactgggcaccagcaacccccacttacatcccatcagcacattggctcaggaatggaagtgccttttcctgtagagtcaatgaaagtcctagggcagactctcattggcccttccccaaatcaatcactgagccaagggcttagggtattctgattggtcaggctgagtcatatggccacttcttcttggccctgacctcctttccacctgcctctgccctcctgcttcagcgcttccaagccatggaggagacacacctgaggcacatgaaggcactgctgggctcatatgctcactcggtggaggacacgcacgtgcagattgggcaggtgagttgggcaggtgtgaggaatgaggctggggtcactgctgggcaaaggggccttgaccagttacacaccccgcccacccggcacaggtgcatgaggaatttaagcagaacatcgagaacgtcagcgtggagatgctactcaggaagtttgcagagagtaagggcacaggccgggagaagcctggtgagtcagggcagccattgggggtcgggcttcggggccacagctgcagacaggcatgtgccaccatgcccagctaattttttttttatttttttatttttaatagagacgaggtttcaccatgttggccaggctggtctcgaactcttgacctcaggtgatctgcctgcctcggcctcccaaagtgctgggattacaggcgtgagccactgcacatggccaggccttggtttcttcatgggaaaaatgggctgctgacaagtccagctctccagcctgatcttatgtgtaaatgtctttgaaccagatcccagaggagccttgaatgccaggcttggctgatcagacttcacccccagggcctaagggagccattgagggttgttgagcaaaagaacaatttgggaatgcgcagatgcaggactgggaaggagttaagagcaaaagttttagagtgagacgtgggtttgagtcttttcttcatcgcttgctgtgtgacctaggacctgtgctttgacttctctgagcctcagtttcctcatctgtaaagtgaggatgtaataatgttgcaacattcagtgatttcatgcaggtaaagggcaaagggtgtgccaggcacacagtaggcactcactaaatgctggtatacagttacgtcctcaagtcttgttaactagcaaaacctgttctttctccctcctgtcgctctggctcaggcctggctcaggtctcccctccctgcatggggccccactcttgcccttcacaggccccagatctgttttgtcctcctcctgctcacacaccttccatggctccccattgttcttgggagagagttcccactccttatcctgtcactcaaagcccagcccactgcacagacgcatggtccattccccgacccaacccaagttccagccacaaatgctggaagtatgtagaagtagctcatgtcaccccctgcggtggcactgccctgctggaaccagaccagccccttggtccatcccacttctgatgatgtggggctggttcttgtccgggaacctgatggaccttgagttcagatccaggtgccattttgtggccaaaagtgtactaccctttccaagcgcagtctccccaccctcaatttagtttctttctctctctctctctcttttttttttttttttaatttttttgaggcagagtcttgctctgtcacccaggctggagtgcagtggtgcagtctcggctcactgcaacctccgcctcctgggttcaagcgattctcctgcctcagcctccccagtagctgggattacaggcgcctgccaccatgtccggcttttttgtaattttagcagagacagggtttcaccatggtggccaggctggtcttgaactcctgacctcaggtgatccgcccgccttagcctcccaaagtgctgggattacaggcatgggccaccgtgcccagcccctcaattgagtttccgtctcctgtctcaggacctctggacttcgaggcatacagtgcggctgccctgcaggaaggcaagtacgtctgggcctggatgcccaggctggaccatgggggtgagggaggctgatctgaatgtgaaaggaggctcacagtgctcaggtgccccccaatctatcctcagcgatgaaacgtttgcggggagccaaggcctttcgccttccaggactaagccggcgggagcgggagccagagccacctgcagctgtgtgaggaagcacccctgcccggtctggcccaggctagaccgagatcccctcccctgcccaggctatcccagaagtcccctcctaggatagcccaggagtatccatattccaggctggaccaggattccctctacctgagctagaccaggagtacctctgcccccggctagctcaatattaccgctgcccaagctagtccagaattcttccttttgctaggttaggccaggaattgcctgtcccagagtaacgtagcatcttccctgcccaagctggcccaggattgttctgtttgccaaggctagccccgactttccctatcttcacaaggcagcccttcaaatgagttccaggattccttccctcccaggctgtttgagaacactctctactcagctaacttcagattcaaccccctccccaagcaagccccatggtcccaccgcctctagggctagctcagggcagtatcacagtctgggagctgccccagcttccatgtccagtgttgggggctgacagggggcaccagatgggctgcggaagctgacaccaacatctcttcctccatccccagagatttcctggagcccgattcaggggtgagtgatgtgggaggggtcaggctgggctacaagtggaaggagtttgatcccactcttggctcctagagtcccgatccctactggaaactaaagagccgagattgaggggcgggctggagcctgggggctgggttcatatcccacctcagctgcaaagtcccatggactacgtgggtgtgaataatgtccctgccgaagctcagtttgtcccaggaacctgcccacacacccagggaagacagtcgttgccatcagggttggttttgaggtctgagtcaaggcctgggggcagggcggggggcggttggcagggtgagatggaaggttcgatagtggggcgcctgactcactgctgccccctgactcccctagacatgtccagaggtggatgaagaaggtttcactgtccggcctgatgtgacccagaacaatatccttctggcaccccctgggggcagttgttggcacagcaaggacaaaattctccgtaataaccagtccaccttcagcagtcctctctgtgtacatcctggagagagtctcctttgtggatgaagccaacctaaatgtaaacacccactctatggggtcagcactgggcaagagggagagagaaaaggagatctagcagggcttcctggaggagggggcaccagtgttggggttttgcagccgaataggagtttgccagttagttctgggcatgcttgtgcaaaggcttctcggggggggtgggagtgctggtgggacatggtgtcaggactgaaggtggcgcgtggtgagcgatgggattgggcaggacctcgaagggtttgagcagggagggacgaggctggattggagagctgactgggggaaagcttgtgttgggattggcttggaccttgactgcagcccacgcacggccgagccctcccgtttctcgtccagcgactccgacttcgacgatgaagagccccgcaagttctatgtgcacatcaagcctgccccggcccgggctccagcctgcagccccgaggcagcagcggcacagctcagggccaccgcgggcagcctcatccttcctcctggcccaggggtgaggcgtgggaggggtgccctgggtgttgctagagaggctggctggatgcattcgtgtgtgatgttgcccactttgtccacagggcaccatgaaacgccattcttcacgtgagtagcctttggtcttcagagtggggaggatcctaaggaagggaggctatgggtttgggcttgaatcataactccgttttgtaactttgggcaggctgcttaaccacactgaccttcagtctccttttctgtaaaatgaggtcattatgaaattaagtgagagctgaaaggggtagctggggccaggagaagctagcatctggagacaggctcgcttaggcttgaatccatgtctgcctgatttgctgatcaccttgggcaactggctggacacccccgagcctcggtcccttggtctgtggagtggggagcattgcaggcagggtgacaagaaggctgaaggaggtgcatctcttgtaggggacgctgctgggaaaccccagagacctcggtctgcccccagaaccagcaggtgggttccacacgagtgggcaggtgggggctgtccccacctcctccctccacctccccatgtctccgcctggtgttctcttgtcccggctgggagttgacgtcatgctggggtttttttgtttttgtttttgttttgagacagagtctcactctgtcacccaggctggagtgcgatttcagctcactgcaacctccacctcctgagttcaagcgattttcatgcctcagcctcctaagtagctgagattacaggcacccaccaccacgcccagctaacttttgtatttttagtagagacagggtttcaccatgttggcccggctggtctcgaactcctgacctcaagtgatctgcccacctcggcttgccaaagtgctgggattacaggcatgagcccttgtgcctggcccatgctggcttttgagggaccatttagtcattcatttgatgaacatttattgagtgcctgctgtgtacctgtgctgttctagggtctgggttctgagacaggtctcccttctcagagtcacattctagtgactccagattttaagaatagcaaatagggccaggcgtggcggctcacgcctgtaattccagcactttgggaggccaaggcaggcggatcacctgaggtcgagagttcgagaccagcctgaccaacataaagaaaccccatctctactaaaaatacagcattagccaggcatggtggcacatgcctgtaatcccagctattcgagagggtgaggcaggagaatcgcttgaacctgggaggcggagcttgcagtaagccactgttgtgccattgcattccagcctgggcagcaagaggaaactccgtctcaaaaaaaaaaaaaaaaaaaaaaaaaaagcaaataagttagagcatattcgatacttctaagtgctacgaagaaactaaagcagatgacgcgaagacaggaggaggtgacttcccttgaggtggggttgggaacctccctgagggggtgacttggagctaagccccaaagaggagctaggaggtgactgtgaagagagctggggaaatggaactccagactgggaacaggctgcacacagtggctcacacctgcaatcccagcactggccaaagcagccagatcacttgaggtcaggagtttgggatcaggctggccagcatggtaaaaccccgtctctgctaaaaatacaaaaattagccgggcatggtggcaggtgcctgtaatcccagctactctggaggctgaggcaggagaatcgcttgaacgcaggaagcggaggttgcagcaagctgagatcgtgccactgcactgcagcctggccgacagagcaagactccgtctcaaaaaaaaaaaagactgggaacagcatgtgcaaaggccccagggtgggatgaggcttgggaaaaatagaagcagccctcttggcctcaccctctctagctgtgcagagagattgcagtcagaggagcaggtgtccaagaacctctttgggccgcccctggagtcagcctttgaccacgaagattttacaggtgatggggataagggattggagggcatgggtgtggccggagggaggttgggtggggccattgcagagttaggccaatgaggtcccctggaagccaggctggagggaggactagtccgtgtaggggtgggcggggccagagtgcgcgtgggaggggccatagatagggtggggccttggccagtgggcggtgactgagtggatgggccggacatttgtggagagggaagtcaccagaaggtgtagccttgggggcgtgcacaaggactttgaatgggggcccccctgaccttccctcgacgtggccgtggcctgcaggaggatgggcagggactctgagtgggcgagggtcggagctgaccgcccgcttccctccccaaggctctagcagcctgggcttcacctccagcccctcccctttctcctcctcgtcgcccgaaaacgtggaggattccggcctggactctccgtcccacgcggcacctggcccctccccagattcctgggtcccccgcccaggcaccccgcagagcccgcccagctgtagggcgccacccccagaggccaggggtatccgggcaccgcctctgccagactcgccgcagcccctcgcctcgtctccaggcccctgggggctggaggccttggccggaggaggtgagtccagcgggcctgggcctgagagttgctggaaccctgggcgggggattgagcgcctgctttgggcagggcctgatcaggctgctggagacacagccaggaccaggcaggcagaacctcccaccgttgcagggacaacaatgagatggacatttagcaaggcaggcggtagcgggtgccaggtgggggccctccctgaggaagggacatctgagctgagatttgagggaggtgaggacagaaccacgtggacatgaggggaaaggcgtgctgggcagagggcacagcccctgcaaaggtcctggggcaggagcgcgctaggcctgtctgaagaacagcaaggaggtctgcctgctggaacggggtgatcacggaaggaggaagaagagaaggcagggaccaggaagggcctgatgggcccagggagggcttgtgaatgttaccctgagtaacgctgagggccatgagcaggggaggggcgggacctgactcaggggtcacaggctccctctggcagcttcgggagtgagggcagaaaccagagactggggaggcaaccagggaggcaagtaggcgatgggggtaagggtggcagtgggagaagcaggtggaaaggtcgctgcaggggagagttcggaggagtaaggatggggaaggagcggagtcaagggagggaggaggatggggaaggagcggagtcaagggaaggaggaggatggggaaggagcggagtcaagggagggaggaggatggggaaggggcggagtcaagggagggaggaggatggggaagggacagtcaagggagggaggaggatggggaaggggcggagacaagggagggaggaggatggggaaggggtggagtcagggaggggtgggggacgtcgaggctgtgcctttaggtgtcaggtgcacagtggaccctgagtgtggggaaggtcaggtcagagcaccccctccttgaagacgtcatcaaaacaggaggagcagccgcccagggagagcagaggagaggacagccggggagcccagaggggttggagacaggaggacagcaggagatggggggagagcggcgggatgggctcctgggggctgtctgaggagaatgggaagcccccgagtcagagggactgtgggctgtgaccacccgaggtccccagtagtgtcaacaagggctcctggcaccctccataggaaagggccaggctggagcccgttcaagggagagctgagtgggtggagaccacagagtgggggcagaagaagctcttttttttttttttttttttgagagggagttttgctcttgttgcccgggctggagtgcagtggtgtgatcttggctcactgcaacctctgcctcccaggttcaaacagttttctgcctcagcctcccaagtagctgggactacaggtgcgtaccgccacacgtggctaatttttgtatttttagtagagatggggtttcaccatgttggacaggctggtctcgaactcctgacctcaggtgatctgcctgcctcggcctcccaaagtgttgagattacaggcgtgagccaccgcacccggcctgagtagaggctcttatccaaccctgcaaattctgcccccccaggggacattgtcagtgtctggagacatttttggttgtcaccaccaggcaggagtggtgctcctggcattcagtgggtggaggcctgggttgctgctcagcaccctacagtgcacagggcagcccccgcccccgagaatggtccagcccccaaatatccacagtgctgaggctgagaaagtcgggtagagcggggagcacagcttggggtacaggtgagaggggaggtaggtgggaggggaggttggcaagcaagggagcacgttcatagatggaacagaaccaggaccctgaggaagcaggagagggaggggagcttgggtgttaaaggcatgagactcagacacagaccacagtaggtggctgcagtcaggttctcggaaagggtagaggtcacaaaatggctgaatgttggctaaaaatcctctgctgaaccccccttacagcatgcctgcgtcttaagccttcagtgcttgcttgcatacccccagtgatggggagctcaccccttattgggccaccattctggtgtctgggagggttgggggtgtggacagtatctgcagtcctgtctggcaccttttctgcaacaccaggacttcagacccattgggggtctctgcagaaaagcccacctcctaagattttggctgagtttgtgcccctggggaggccccagaggccccgggcagcatctcagcagtgcctctttgtactcgctcctagacctgatgcctgcacctgctgaccccacagccagggagggcctggcagccccacccaggagacttcgctctaggaaggtgtcctgccctctcacacgtagcaatggggacctggtaggtgagggggcgtggcaggagctggactgggggtcgcgtctggggtccgcttttgggcactggtcctggggcactcacagccaagattgtctctttcccttccagtctcgttccctgagcccctccccactgggctcttcagccgccagcactgccttggaacggcccagcttcttatcccagacaggacacggtatgtgagggcggtcctgggcctggctttgggcctcagtgtcaccttctctggtctgggtgggtggcttctctgttggcagaggtgtggttgggcggagggagtctcgagcctggagcctatattcacactgtctatccgttgttccccattccctctccaccacccccaggagtctcccggggtccgagccctgtggtcctgggctcccaggatgccctgcccatagccacagccttcacagagtatgtccacgcctacttccgtggccacagccccaggtacccagtgatgggcagacagggcccgtgggaagtctgtgttgggggagtccagcagggacagctttcagatgtgcttcatggtctgtcttatagtgaaagggccttgaacactgagccaagtgaccaggcccctgtcctgagggcagtggagccataggagggcctttttttttttttttttttttttttttttgagacagagtttcgctcttgctgcccaggctggagtgtgcagtggtgcaatctcgcaatctcagctcactgcaacctctgcctcccgggttcaagcaattctcctgtctcagcctcccgagtagctggaactacagatgcgtgccactgcacccgactaaattattgtgctttttgtttgtttatttgtttgtttgtttgttttgagacagggtctcactctgttgcccaggctggagtgtagtggcgtgatctcagttcactgccacctctgcctcctgggttcaagagattctcctgcctcagcctcccgagtaattctgggattacaggcacatgccaccacaccctgctgattttgtgtctttagtagagacagggtttcaccatgttggccaggctggtctcgaactcctggcctcaagtaatccagctgcctcagcctcccaaggtgctgggaggatagacatgagccactgtgcccagccataggagagcatttaagcagggctatgcattgctgtagacgccaaggctgccgtgggcattaagatgaagggagtaatactagaagttaggcccagtaagtgggtaagggcgtgggttagggacaagcggagtgcagggatatatattggggtggccttcagcagaaaagatctgaaagtcaaaccatgaagaagaggagagtgtcagatcaaaaacccaagcaaaggatagctaaaaaactgaacattttaatttgagcttcctggtggcctaggagaaaagagaactagggatggagatgttcctgcctccttcagcccagggtggattcttcctgtccaggcaggaatgaaagaggaggttgggggaaaggatacgggggatcatcagggccatcctcctagatccgaggagtctggggagccacaggcaccagtgaaaccaagagaaggggaaggatgaggcaccaggcagagccctaagccaacacccagtcccctcatcctccctagctgcctggctcgagtaactggggagctgaccatgaccttccctgctggcatcgtgcgtgtgttcagcgggaccccaccaccacctgtcctcagcttccggcttgtacacacaaccgctattgagcacttccagcccaacgccgatctgctgttcaggtactatggaggggcagtgggagagggcctcggaggctgctggggatcaggcttccggactctgagttccctctctgcttcctgggattttttcttttcttttttttttgtagagacggagtcttgctctgtcgcccaggctggagtgcaatggcgtcatctcggctcactgcaactccgcctcccgggttcaagcaattctcctgcctcagcctcccaagtagctgggattacaggcacgtgccactacacccagctaatttctttcgtattttagtagagacagggtttcatcatgttgcccaggctggtctcaaactcctgagctcaggcaatccgcccgccttggcctcccaaagtgctaggattacaggcgtgagctaccacacccggcttgattttttttttttaattattatttttttgagatggagttttgctcttgttgcccaggctggagtgcagtggcgtgatctcggctcactgcaagctccgccttccggattcaagtgattctcttgcctcagccacctgagtagctgggattacaggcatgtgccaccatgcctggctgatttttgtatttttagtagagatggggttgcaccatgttggtcaagctggtcttaaactcctgacctcaggtgatccacccgtctcagcctcccaaagtgctgggattacaagcatgagccaccacacccagccacctcctgggatttgctgtgtggcgtggggcaagtaacttgccctctctgacccttgttttccatccctcctttactgcccgcaccacaaccacccaggtagggctttgctgggcccagggtgggccaggaaattgcatctttaggaaggggtagattgaatgctgggagccctgggagggcatgtcccgaggattggggtgatcagtccgggtctctgcagtgacccctcccagagtgaccctgagaccaaagacttctggctcaacatggcagctctgaccgaagccctgcagcgccaggcagagcagaaccccactgcctcctactacaacgtggtgctgctgcgataccaggtgcgccacccgcatggggccgggaggaggtggtggagtgggggacacggtgagccggcagcagacatggaggcgcctgcgtgttggccaggctggtctcgaattcctgacctcaagagatccaatctgtgagagccgatgagctggagggagtaggcagtgtgggtcgggaatgaacggtggaggagtaggcagtgtggaagagcgtgcatcccctgttgcagatagtatgtttatgtgaactagaagcagcccagccccggaaccttacacttgaacttccctgggagactttgttagaatgaggcgctctcctgccccctgctggaaacctggtgtaatacagcctctcatccatcaaatctccctgtgactggacccccttggggcggtgcgtgcatcgcagggtcaaggtggttgaatagcgcatggtgtggcaagacaggatggcccaagctgtgtcctctctctcattctcattcttcctagttctcccgcccgggtccccagtctgtgcctctgcagctcagtgcccactggcagtgtggagccaccctcacccaggtctcagtggagtacggctaccggcccggtgccacggctgtgcccacaccactcacgaacgtccagatcctgctgcctgtgggggagcctgtgaccaacgtccgcttgcagccggctgccacctggtgagggcttgcgggaggccaaggaaaactcagcagtttcccccataaccccagaccttctccctgatgcattgattaaagggtgcaccctcggcctgaccgttaactgtgagcccaccctgcttagcactaagggtgatgttatgagtgccaggtgcagtggctcatgcctgtaattgcagtgctttgggaggctgaggtgggaggatcacttaaggccaggagtttgagaccagcctgggcaatatggtgagatctcatctctacaaaaaatattttgtttatttatttatttatttaatttatttactttgagatgaagtctcgctctgtcgtgcaggttggagtgcagtggcacgatctcagctcactgcaatctccgcctcccgggttcaagcgattttctctgcctcagcctcccggatagctgggattacaggtgcctgctaccacacccagctgatttttgtgtttttttagtagacatgaggtttcaccatgttggtcaggcttgtctcgaactgctgacctcaggtgatccacccgcctcggcctcccaaaggactgcgattataggcatgaaccactgcacccagccttacaaaaaaatattttaaaaagtagtcaggccgggtgcggtggctcacacctgcaatcccagcactttgggaggccgagatgggcagatcacgaggtcaggagatcgagaccatcctggttaatatggtgaaaccccgtctctactaaaaatacaaaaaaaaaatccgggcatggtggcgggtgcctgtagtcccagctacttgggaggctgaggtgggagaatggcgtgaacccgggaggtggaggttgcagtgagctgagatcatgccactgcactccagcctgggcaacagagtgagactccgtctcaaaaaaaaaaaaaaatagtagtggtagtgtgctcttgtagtcccagctactcgggaggctgagacagaaggatcacttgagcccaggagttgaggcttcaaggagttaccctgggtgacaactgtctcttaaaaaacaaaaatttaaaaaaaaaaaagtctgttgtgaagaagccagacttataggacagaatgcgtcatctaaaagtgctgcaaggaagccgggcatggtggcttatgcctgtaatcccaacactttggaaggccaaggcaggtggatcacctgaggtcagcagtttgagaccagcctggccaatatggtgaaaccccgtctctactaaattacaaaaattagccaggcgtggtggcgggcgcctgtaatcccagctactcaggaggctgagggaggagaatcgcttgaacccaggaggcataggctgcagtgagcagagatcgcaccaatgcacaccagccggggcgacagagggagacaccatctcaaaaaaacacacaaaaaaacacaaaacaaacacacacacacacacacacacagaagtgttgcaaggctgtgtggctccacggctgttccatatctcaccctcatttcacagatgaggaaattgaggtgaagtgggggagaaggtttgttggggtcacacagccaggaggcagctgaggcaggaccctgggctctcagcatcctctctggggaagccctgattaagattctttctctgccaggaacctggaggagaagcggctcacttggaggcttccagatgtgtccgaggcaggcggtgagctgtggttgtgtatgagggctgggtgggagggactggggtcaggtgggaggcacttatttatgttggggaagaattggggacatactgagggcgggcaagtatgggcattgaggaagtctttaaaagctggaggagggccgggctgagtggcataggtctgtaatcccagtgctttgggaggcccagaatgcaggatcacttgagtccagcagttggaggctgcagtgacccgtgatcgtaccactgcactctagcctgggcaatagagccagactctgactcaaaaacaaacaaacaaacaaaaaaggccaggtgtggtggctcacgcctgtaatcccagcactttgggaggccgaggtgggtagatcacttgaggtcaggagttcaagaccaacctggccagcatggtgaaaccctgtctctactaaaaatataaaaattagccgcgtgtggtggcacgcacctgtgatcccagctacttgggaggctgaggcaggagaatcgcttgaacccagtaggtgaaggttgtagtgagccgagatcgtgccactgcactccagccagggtgacagagcgagactctgtctcaaaaaaaaaaaaaaaaaaaaaaaaaaaaaagctggaggagggccaaggacagtggcataggtctgtaatcccagtgctttgggaggcccaggtgggaggatcacttgagcccaggagttagaggctgcagtgacctatgattgcaccactatactccagcctgggcaacagagccagaccctgtctctaaaaaaaaaaaaaaaaagctgaaggagagggcgtcccagggccagatggccagacacagcaggtgcaaaggccctgaggcaggactcccttgctagccatacaaagcccagtgatgccaggagagacagatgcaggggatcaaagggaggtctgatggggcacataaaggccacagaacagagggcttcaggtgtgggccaaagatgagcctggttcacagctgggacgggggctggtgccagggcgcagctgactgcaggtctccccaggttctggccgcctctctgccagctgggagccgctctcagggcccagcacacccagccccgtggctgcacagttcaccagcgaggggaccactctgtcgggcgtggacttggaactggtgggcagcggttaccgcatgtcgctggtgaagaggaggtttgccacaggtactccccaaccctgctgctgggtgacctcaggagccgagatcttacaggggcaagccccggggtgtggggagggattggggtgtggggatccttgggaaagataggtgggtgttggggccaggagaccccagatggggggcacaggtgggcaaggaggcagggccctgtgtatctggggctggcccttggaggacgtccttggaaggaccccagccagggagcccgaagtcccccctgccaccccctcctccagccccaccctgttctcctgcccccaacaaggggctcctggggcccagtggcaacagggactatgagttacaggggtgttttgaagaggacaaggatgattgaagcatcccagggtcagagccggggaacccctcccgtacccctcctccccacccctccccctcacagctgcacccccacagggatgtacctggtgagctgctgaacccgcaaatgctgctgccccagctctacactgcgccctggtgctggctgaccaccccctgccctcctgccggaccctggggcctcccaccccagcctccctgaggcccatactccacggagaggagccccatgcccagcctggctgagcccgagattcgctcctccccctcatgccaaccccacacaggtcccggccttttaatgttctttgaataaacactttattttctaataaaataaaaaaggaaaccttttcctgctccaggaagtatcctttgcgttgccagagaggggaggaagagaaggtggatggatacgagagacctaatgtacctccctccctgcactgcgctcaaccggtacagggccattctgggagagaaagaacaacacagataccccagccccatgggctcagaggtgggctatagggagggaggaggactacagaagcccagaaaggggtgtcaggagtcttcccaagcagtcaggaagactttctaaggagggggcattataaatgaggttttgaggtatgagtaggagtttgcaagataggaatgggcatcccaagcaaagtgatggaaggttgttagttcaatgaggaagcaattagtcaacctacaaatattaattgagtatctactgtataccatgtagcagagagagagctatgagcaggacaaagttcttggaacccaggaagtggagataggaagcctgagtgaggagcctgcttggcggccactggctgtgtgactttaagcacgggacttgagcctcagctcatctgcaactcacctcactggatatctgtgggaggtcacacacttagaagagtgccaactacagggcaaaacccccactagtaccaggcagctttgggagccccaggaggagggtggaccttggtgcaggtgtgcaagaatggcccactggggagggcaggacagaagcagtaacagcagactgcagtggggagcaggtctgagcccagtggacagtcttgggtcctgatggatattcagggaaccagggcccgtgttcctgaccttgaggctgtacagaccccagggagcaagcccagactggatgaagctcagaaggaaggaagtaggaggcaggatttggcctgagacttgctgtgcgctgtctctgatcatcccaccctgtcctccaaagagagagtgcctctggctgtgcgtcagtttccttgtctgtaagatgggaggaatcctgtagttgggagaggttcagggagcattcttggcacaaagcaagtgcataattaacattggctgagagtcgggcaccgtggctcacgcctgtaatcccaacactttgggaggccgaggcaggaggatcacttgagagcaggagttcaagaccagcctgggcaacatagcaagaccccctgtttctacaaaaataggaaaattgacccagcatggtggcacacgcctatggtcccagctacttgggaggctgaggcaggaggatcaattgaacccaggaggttgaggctacagtgagctaagatcacactggtgctctccaaggctctgggcagccacagagtgagatactgtctcttaaataggccaggtagggtggctcatgcctataatcccagcactttgggaggccgaggcaggtggatcatttgaggtcaggagttcaagaccagcctggccaacatggtgaaaccccgtctccactaaaaatacaaaaattagccaggcggtagtagtgtgcacgtgtaatccctgctacttgggaggctgaggcaggagactcgcttgagcctgggaggcggaggttgtgatgagcccagattgtaccactgcactccagtctgggtgacagagtgagaccctgtatcaaaacaaaacaaaacaaaaacaacaaaaacgtcagctgtaggaaggaaggatgattataggagttggggcatcaaatgggggcagaggtggctgcagcacctgccctgtctggctacaaacagcccagggacttcccagcccttcatgtcttctcccttgcaggtcttagcacctaggctgtaaattcagagaccacacctgcccagtgggtgtggctctgggtgtcagagagtagtggcatccatggggccactgggtgtcagacatccatggggccctgggtatcagagctgagctttatagaggtgacaaaatcaaaatctgtttgccaccacctcctcataatgtagcctaatctgggcatgggttcttccctgtctgataagtggcgggtacatggcacctcctagtagcttttatttgccttcctggggacacaaatgaggctgggcaccttttaaaatgaagaaggcatctgggcatggtgactcatgcctgtaattccagcactctgggaggccaaggcaggtggatcacttgaggtcaggaattcgagaccagcctggccaacatgataaaaccccatctctactaaaaatacaaaaataagccaggcgtggtggtgggcgcctgtaatcccagctattcgggaggttgaggcaggagaatctctggagcccaggacgaggaggttgcagtgagctgagaacatgccactgcactccagcctgggagacagagactccatctcaaaaaagaaaccaaacaaacagggctgggcgcattggctcacgcctgtaatcccagcactttgggaggcccaggccggtggatcacttgaggccaggagttcgagactagcctggccaacatggtgaaacccccatctctactaagaaaacaaaaattagctgggcgtggtggcaggtgcctgtaatctcagctactcgggaggctgaggcaggagaattgcttgaacccggcaggcagaggtttcagtgagcccagatggcgccgctgcactccagccttgatgacagagcaagactccgtctcaaacaaacaacaacaacaacaacaaaaaaaacaaaaaaacacaagcaaacaaaaaagcgcagaaggcacttttcccaggtgtggcctcctaactgcccagccttccagagcaggtgtgacgtgacctatctcagaagagtgaattccaagagagagggcgcggaacccgttaaacctgccaaccccgggcaggcgtgatgccattatgcagtttacatgccctggtctcttccacccgggtggccttaaaacctcagctgtggtacagagtgatccattggcacagcaccatcaactgggccacatgtcagaggccacccccagctgataagtggcctaattggattttcttttgagctgaaattcacaaaacaaaaaatgaaccactttaaaatgaacaattcagtgagtttcagtatattcataatatgtgcaaccacaccctttatctaatttgtgcacattttcatcccctccgaaaggaaaccctgtccccttcagcagtcatgccccatttcccctcccacagctcctggcaaccactaattagcttcctgtctctgtggatttgcctgttctgggcatttcacataaatggaatcatacgacatgtggccttttgtgtctggcttctttcactcagcatcgtgttttttatttcatccctgttgtagcagggatcaggacttcaatctcttatcaggacttcaatctctctcttttttttttttttttgagacagagtctcgctctgtcatccaggctggagtgcagtggcatgatctgggctcactgcaacctctgcttcctggatttgagcagttctcctgcctcagctccccgagtagctgggattacaagcatgcgccaccatgcccaactaatttttgtatttttagtagagagggattttgccatgttggccaggctggtctcgaactcttgacctcaagtgatctgcctgcctcagcctcccaaagtgctgggattacaggcgtgagctactggccaggacttcagtctttctgatggctgaaaaagactccaggcagggcacagtggctcacacctgtaaccccagcactttgggaggctgaggcgggtggattgcttgaggtcaggggttcaagaccagcctgggcaacatggtgaaacccccgtctctactgaaaatacaaaaagtagccgggcgtggtggcaggtgcctataatcccagctactcgggaggctgagacaagagagctgcttgaacctgggaggtggaggttgcagtgagccaagatcctgccactgcactccagcctgggtgacagagcgagactctgtctcaaaaaaaaaaaaaaaaacaaaaaaaaaaaaaactcaagactccactgatggaccacatgttgtttatccattcatccactggacacttgggtgggtgatcaccacccaagcagctgaaaagaacactgtgaatcatgctgctatgaacttccctatgcaagcatttgtttcaacacctgttttcaactcctttgggtagatacctacaagggcaatggcgggatcatagggtcattctagtccggatttgaacccgggccctccagcaccagaattcactctattgcgtccagtgaaccccggaagcacccggtttaaaaggtctgggggctcagggtatctgtatgtcttacacatgggaaaagggtgggagggttcagtttccctgggtgagtggggcggggctagagctcacatcctcccagcagcctgaattctggagggccagtacctggtggaggaggggatgggcggggaccctgtcacaggatggtacttttttttttttttttttttgagatggagtctcactctgtcgcccaggctggagtgcagtggtgcgatcttggctcactgcaacctctgcctcccaggttcaagtgattctcctgcctcagcctcctgagtagctgggattacaggcgcccgccaccacacctggctaatatttttgttttttgtttttttttttttgagatggagtctcactctatctcccagactggagtgccgtggcatgatctctgctcactgcaacctccacctcctgggttcgagtgattctcctgcctcagcctcccgagtaggtgggattacaggcacccgccagtatgcctggctaatttttgtatgttttagtggagacggggtttcttcatgttggccaggctgatcgcaaagtcctgacctcaggtgatcccctcactttggcctttggaaggtgctgggattaccggcatgatctgcccacttcggccttccaaaatgctgagattatagggttgagccaccccgcccgcccaggatgggacttttggttccggctccttcccggccgacaaatcccttcctggggccatgacttggtgaacccagggacccaacagggtgagcatagactctgaatcaaagtccaaggatgtaccacagtaagaaagtgtgtgcatccagaaccgaggccagtagtgccacatttgacactatgacatttccggtaattgccctccatacagttttaatcatgcatttgctctgagggttcactccccagacctctcccatccagagtacccaggggctatttcttacattttacaggtgaggaaactgaggcacagacaggccacatatacacctcggcttcctcctcgggaagaaacagggatgaaggaggaaggaggggtttcctgaaaccatagcccagctcacacacctggacttccccaaccccagagctcccaacgctgggtccaggctagaatctcctagagattcagaggcagcacagggcagggttcgaatcctagccaacccaaccctaaaaatctacaaatctgaggccaggtgcagtggctcacatctataatccagcaccttggggatctgaggcaggaaggtcacttgaggcccacagttaagaccagcctgggcaacatatcaaaaccccatatctagaaaaatgacaaaaattagccaggcatgctggcgggtgcctgtagtcccagctactcgggaggctgaggtgggaggattgcttgaactggggaggtcgacattgtagcgagcggagatcacaccactgtactctagcctgggtgacaaagcgagatcctgtctctcaaaacaagaaaaaaagaaaaagaaaagactacaaatctgtctgattgttgacttccagaacccttccaaatgccagcaggtggcatctggatgtctgggggcacatcgtaggttttcgggtcctggaattattttcaatatagagatggaatctcactatgttgcccaggctggtctcaaactcctgggttccagcgatccgcccccctcggcctctggaagtacaggagtgagccactgcgccgaccccagcttcaggaatctttgaactccccgcagagagcagaggtgccgcaaggtttaacctgcctccctccctccttatcgccatgggcttatccaatcatttcttcacggaacacacgtgggccaacgctgaccgggctctgtgccaggaacccgcaaggcgctgcttgttcatctccagccacggggagctcattccctagcagcgggccagacccaaggtggggtcgtgagccccgagaggggcgagggtggcaagagcgggatggcagaggtggcagccgggaccggagaggggaagaggcatggccggggagggaggagccggcagagaacttcgcctgggccaccaggaaactcagccgagctgggaagagggggactggcaagcggccaaggcggagggaggcaggaaggcgtgaggcccggtgggagggaggaagcgggagaggggcgggagctctggctcaggtaaaaactctttcttcggctcgcgagctgagaggagcaggtagaggggcagaggcgggactgtcgtctgggggtgagtgtcggcagcccccggaggatctggcggaccccagtggtgggggtttgggggtggggaagttgtggctctggagaagcccctgccggtctccaccgcgcataccctgcagatgtgggaacattcgggagccccgagtctcgagaacccggttgccctcacccatccgtaattgtctccggcgttcccaaggccagctcggacctgggtcggggaggaagcctcccccacagctggcgacccgggaccccggcgcccctcccagattgggcgggatcagacccccgaggcggatgccgcttagtcagacttggctgttactgttacctgtgttgttgagattattggccccttggttgggagtatctgggcaagccagcgctggggtccccggttgggtttgggaactgcaggtgacccccagtctctccctgcggttccggtgctgcaggccctgccaggtggctgggcggcattccaggggccctggctgcgtggcatggacacattgctgaaccggcctcagtttcccctccgtgaggtggaacaatgaaccagctgggatgaggatgcccgaagcgtttagtcaaaggaaatttttgtgatgaggtgtactgctggccactgggggcccttgcgtgactggcgttaggtctctgagcctcagtttccctgtgtgttaagggggggtctcatggcatgggaccttggcgaggatgagttgagtggataggagctgtggccactcagtgggtgcccagggacagtcagctgtcatcataattatattaattatgtctgtagccactgttcagattcactcctgttccaagaatcccgaccatcttttcctctgggtcagatttaaactttttgtttgtttgttttatttgtagaggtgggggactcactttgtcacccaggctggagtacagtggctccatgcactgtattcactgcagcctcaacctcctgggctcaagtgatcctcccacctcagcctcccgagtagctgggactacaggtgcacaccacaggcagctaattttaaaatttttttgtgtgtggagacggggtctcactatgttgtccaggctggtctcaaactcctgggcccaagcaatcctcctgccttggcatctgaaagtgctgggatttcaggcatgagccactatgcccagctctgatttttttaaatggacacttctcaagaggaaactgaggtcgcccctcaacttgggcgggggactcctgcagtccagatctgggattcagggcccatgggaagccacctggccgtctaggtctggggccagccctgggggccatcacttcctcccactggcctgttctcaaggtgacaccaggcagggctggtgtcaggaggaagaggtgtggcccccaggtcaggcagctgggcccccatatggcctaggtgagcagttgggtgtttgctcagtccagcctggacaccctccctcactctcacccctagggtgtggcatttcctggcaggtgctctgggtgtgggagaaccaaaagggggccttggtgcttctctgttccaggccagagttcaggaatccagacaagccaggtcagcccaggaggagcaagtaagggctcactgagtgacatttcctcctgccaccagcctctgaggcccagagcaagcaggaatttgctcactcccccaaccccatgagccagggaggatgcctattgtggaccctcttcctggtgggaatctggcttgccttgattgctcctcatgatggtgaggtcactaccaacgtggcaaactaaaggaaatctcatcagctgggagttaaagacaggaactaggctcccacccaacctttcttaggtggatttctaggcctctctgtgcctcaattttcctatccataaaaatggagctaatgcagccctacttctcagcacacatatagagtttagatggacagatggtggccaggctgcacacaggacctggcatattgatcctagtcctaattatgcagctcattatgttatcatttatagcatgtatctttgcacacagaaataatatcatgaatatttctgagctctaagtacaagacttggagaagagctctgaccagcctgaaggtgtgggggtccaggaagtccccagaggaggggcccaggagacctcagttcccccatcactcctggattgtgggaagggtctgaggttgaactgcgatgcacggcctggcttcccagcctgtttccccatctatggagtgagcccaaagatgccctttgagactccactgggccagggctggtgttattcaggggcccctttccagtctcacataggtgccccaggcagttcctgcaatggggtagggctggcatggatgacatacaattagtcatccatgacagagcctcgggacctagaaacccgggacaccaaagtctaaagtgcatgtgtcaccgtgcccaaccccacccctttttccatacccaggcactccctggtgcagatattgagtatatattgacagagaactcactagtacacatggtttcactaaagcagggtccggccattgtgaacttaaaggatttactgggctatttcttcttcttttcttccccttctgtttgcaaaagcaactcctgctccttgtaaaaagggaccagcctatcattactgggaaacccaaactggtaagaactggtgaggaaccacccacaggggctggcagatcagggttcaaatcccaccaacccgccctggcctcagtcggctgtgtgaccttgggcagagttgcaccctctctgcacagatcgtccacctggaccctaggctcccctctggaaggctcagtgagactcctcgggttcctccacaggccaggggctcacaccctctcctgcaagcgtccccaacttccaccctggagtttcttcacccctagaggttgcactcctctggaaaattgtcctgtttgccacttctctgtcccctgttagtggtgtatcagcgtcctgggcacacgagtgtttctctccatcatcttggctgtgtcctcggaacctagacccagatgtggcatacgctaggtgctcagcacttgctcagagcagtcacaactctgcaggtgataagggtggtggcagctgctattaaatctcattgtggctgggcgtggtggctaacacctgtatttccagcactttgggagaccgaggcgggtggatcacctgaggtcaggagtttgagaccagcctaggtgacgtggtgaaaccccatctctactaaaaatacaaaaattagctgggcatggtaacgcacacctgtaatcccagcttctctggaggctgagacaggagaatcgcttgaaccctggaggcagaggttgcagtgagccaagatagcaccactgcactccagcctgggcaacagagtgcggctctgtctcaaaaaaaaaaaaatctaattgtggctgggtgcagtggctcacaactgtaatccctgcactttgggaggctgaggtgggaggatcacttgagcccaggagttggagaccagcctgggcaacatagcgagacccatctctacaaaaatgaaattagccaggggtggtgatgcatgcctgtggtcccagctactcaggaggctgaggcaagaggatcagttgagccctggagttggaggctgcagtgagctatgatcgtgccactgcaccactccagcctgggtgacagagcaagatcctgtctcaagaaaagaaaaaaaaaatctcattgttggcgcttcacatatgtgccacttggagaaaaggccactgcttggagctaccacttgaccctctagcctttcccaggactcaaatccgtatgtagtcaaacgggattcttccagaagcttctctcaccctccacctcttgccttgccttttggcggcctcagaatgttccacacctccatccaaatcccaatttaggatgggtgagaattggagaaacagcggccacagcaatgctgatagtcaggtggtggttctgccaccattccagctttttttttttttttttttttgagatggagtctcatttacccgggctggagtgcagtggcgcaatctcggctccctgtaacctccacctcctgggttcaagcgattctcctgcctcaggctcctgagtagctgggattacaggcgccctccactatacctagctaattttttgtatttttagtagaaatggggtttcaccatgttggccaggctggtctcgaactcctgacctcatgattcgcccgcctctgcctcccaaagtgctgggattacaggtgtgagccaccgagcccggctgaccatcccagctttgcagaggaggatgctaaggtctgggtggccccagctactcggcccaggtcccatggaaggtcagtagctgggtcagaaggcccttcctcaacggctgtcgggggtccccatggctgcttcaaaggcatcagctcacagaccagtcctcccagctgcaggcaaggcagagactgagagccagcgaccaggctggttaggggtatccaggccggttaggggtatccaggcctgggagtccctgaagagcaatccagaagtagccctatctgggcctcagtttcctcatctggaaagtgggagtttcacagggagaattaccttaatgctatggagacctctgagtcagtgtcaggacatcccccgccccctgtgccactccccatcacctgtggtctccaaatagtcttgggagtgaggggggcagatctagccccaggtggtaccagcagggtccttgatgactttcacatgccccacatctcttgcagacagtgacaagaacagggttgagactgggcgcagtggctcactcctgtaatcccagcactttgggaggccgaggcgggcagatcacttgaggtcaggagttcgagaccagcctggccaacgcgctgaaaccccgtctttactaaatatacaaaaattagctgggtgtggtggcgcacacttgtaatctcagctacttgggaggctgaggcaggaggatcgcttgaaaccaggaggcggaagttgcagtgagccaagatcacaccactgcacttcagcctgggggacacagcaagcgagactctgtctccagaataaaaccaaagaaacagggatgagggcgacagaggtgcctggagccacttgcacctggggcaagggcccagccttgactgccccctgggagtggcagaggacatggggccagggtgcagctgccaatgcctacgattctgctgagcagacaacccttctgcatatttagtggtcattaattttcaatgagtcattaatacttagtatcacctgtgcattgaagcatgaatattcagtgaccatgaatatttggtatctgaagactgtttgtggcttgttaatattcctcatgatactattaggccgggcgaggtggctcatgcctgtaatcccagcactttgggaggctgaggtgggtggatcacctgagattaggagtttgaaaccagcctggccaacatggtgaaactctgtctctactaaaaatacaaaaattagccgggtgtggtggtacatgcctgtaatccctgctactcaggaggctgaggcaggagaatcacttgaacccaggagggtgcaacctccaggttgcagtgagctgagatcgtggcgctgcacttcagcctgggcgacagaggctctatctaaaatatatatatgtatatatatatattcctcatgataatattcaagtatcatgtatgtgacttgcaactttaaaaaaaattcagtatatttgggcacaacttgcaacttttcattattgctttgcaactattttgtatattacgaatagtaggcacctcctctgtagttaatggattgttaatgttcagtacttcactaacatgcagcactttttttgtttgtttgtttgttttgtttttgagacagggtcttgctctgttccccaggctggagtactgtggcgagatcatggctcactgcagccttgacctcctgggctcaagcgatcctcccacctcagcctcccaagtagccaggactacaggcgcacaccaccatgcccggctaatttttgtattttttgtagagatggggttttgccatcttgcccaaactcttgggctcaagtgatccttccttctcagcctctcaaacagctgggattacaggtacaagccaccatacccagctgttttttgtttttttgttttgagacaggatcttgctctgttgcccaggctggagtgcagtggtgctatcatagctcactgcagccttgaactcctgggctcaagcgattctcctgcctcagcttcccaagtagctgggactacaggtgcacgccaccacacctggctaatttttacactttttgtagagacagagtctcaccatgttgcccaggctggtcttgaactcttgggctcaagtgatcctcccacctcagcctcctgagtagctgggactataggcactcaccaccaccacaccaggctaattaaaaaaattttttttggctgggcatggtggctcacgcctgtaatcccaacactttgggaggctgaggtgggcggatcacttgaggtcaggagtttgagactagcctgcccaacatggtgaaaccccgtctctactaaaaataccaaaagtagccaggcgtggtggcacatgcctgtagtcccagctattcaggaggctgaggcaggataatcgcttgaacctgggaagcgggggttgcagtgagctgagatcatgccattgcactccagcctgggtgacctagcaagattctgtctccaaaaaaaaaaaaaaatcattgtagagacagggtcttgctgtgttacccaggctggtcttgagcacctaagctcaagtgatcctcctgcctcagcctcctaaagcactgggattacaggtgacttatcttgactgaatcacgggtgcccaaggcttactagtctcccaagctataaatctgtcttctgaggcagaacgtgtgcggcaggggactgtggctgctgcctcgtggagtgggggcgaggctgcagtgagataggaggtgatggctatcgtactttttcccttctgcaacaaactaggtagcatcctgtgggagcacagttgcaggagataagatgcccagccctggggcttcaggctggctgggcagatggacaggagagaagcgaagagatttcccatgtctgatggtggtgaatgctacagacatcagcagtgctggggctaggtgttttagcctggaggtcgaagcctctcggaggtgacatttcaggggaagcctaaatatgaagactacggaaagagctggaaaggaagggggtcctaggtggaggcagtggcaggtgcaaaggccctgaggcagggctgagcttgggtggtttttgtttgttttgagacagggtctcgctttgccaccaggctggaagtgtgatcacagctccctgcagcctccacttccagggctcaagtgatcctcccacctcagcctcccgagtagctgggactaaaggcatacaccaccatactcagctaatttttttacttttttttttaatttttagcacagacaggtctcccttttttgcccaggctggtcttgaactcctaggctcaagcaaccctcttgcttcagcctcctaaagtgcaaggattataggcatgagctactgcatccagcctgagcctgggtgttaaaggattttttttttttttgagacagaatctggctatattgcccaggctggcgtgcagtggcacgatctcggctcactgcaacctccacctcctggattcaagtgattctcctgcctcagcctcctgagtagctgggattacaggcgtgtgccaccacacctggctaatttttgtatttttagtagagacagagtttcaccatgttggccaggctggtctcaaactcctgacctcaggtgatctgccctccttgacctcccaaagtaccgggattacagacgtgggccacagctcccggccatgtttaaggaggctggtgcagctggagcagatgagtgagggcagagattgtgtgggaaagatggcagcagagaggacccacatcctgcagccacaccccaggcggtggcttctgggtcttggcaggggaaataaatggcttttctgtgcatttgaggaagtgggttctggaggatggcaaaatcgcactggcacgtgaagtgcaaacagctccaggcaggaccgactggtctggcagcgggcggccaggcgagggtccccaagagtcagcctggatgtcactgctggacactggtggcaccgtgtctggcttggggtgaagttttttcacccaccttgaacaggagtgcagggtaggcgctgtaacatgcagggaacatatgacaattgcctgttggcaccaggcatggtgactggtgcctgtggtcgcagctactcaagaggctaaggcaggaggatcacttgagcccaggagctggaggctgcagtgagctatgatcgccactgcactccagcctggacaacagagcaagtgagatcctatcactaaaaaaaaaaaaaaaaaatttttaattagctggcaaggtggcttatgtctgtaatcccagcgctttgggaagccaaggcaagaggattgcttgaggccaggaattcaagaccagcctggacaacatagtgagaccctgtctcttaaaacacagcacacacaatcaatacctgttgggccttcctggcttataggccatggtgtgccaacagctctcacctggataccagactgagcctcccactgcccagaggttcctcattctgctccttctggtccttctttttccaccccctaacatctggacatctgggctgtgatcgaaacattgatgactttcttcatcttattttccttttttttttcttttctttctttcttttttttctttttttttttttttttgagacagagtcttgttctatcgcccaggctggagtacaatggcttgatcttggctcactgccacctccgcctcccagattcaagtgattctactgtctcagcctcctgagtagctgggattacagacacgcaccaccacacccgggtaatttttgtatttttagtagagatggggttttgccatgttggccaggctgatctcgaactcctgagctcaagtgattgcctcggcttcccaaagtgctgagattacaggcgtgagccaccgtgcccagcttttttttttttttttttttttgagacatagtcttgctctgttgcccaggctggagtgcagtggtgtgatcttggctcactgcaacctccgcctcctgggttcaagcgattttccttcctcagcctcctgagtagctgggattacaggcatgagccatgagccaccacgccctgctaatttttgtatctaatattttgtatttagtagagacgggggtttcaccatgttggccaggctggtctcgaactcctgacctcaggtgatccaccactttggcctcccaaagtgctgggatgacagctgtgagccactgcacccagcccttcaccttattttctaaacctgcatactctcctataccccagcagccagcctctgtctaggccaccaaactcttccacctagatgttacccaatctccccccacccagcctcctgagtagctgggactacaggtgtacaccaccacactcagctaattttgtttcatttttttatttagcagagacagggtctcccttagttgccctgccctgactgaaatgtccctaatcccttagtgaccacagggatttttttttttttttttaatgacagtctctctctgttgcccaggctggagtggtgtgattatagctcactgcagcctcaaactcctggggtcaggcaatcctcccacctcaacctcccgcatagctaggactacaagtatgcatcatcacgccggctaacttttgtattttgggtagagatggggtttcaccatgttgcccaggctggtctcaaactcctaagctcaagcgatcctcctacctcagcctcccagagtgctgggattataggcctgagccaccttgcccagcccacaggggacttcttaaaggcataaatcaatctgatccctcccctgctcatagaccctccatggctcctcattgcttctcacaggaaacataagacattctttctggcgtgcccattctattcttgtaccctagcagggtcccataactccaccatcacctcctttctctcgccctgtcccaaccacgtcagcctcctcgctctgccaccagcaccctaaatttgtatccatctcagggcctttgcacatgctccactctgtctggaatgcccttccccacagtctgctcaagtgaattcccatcatccttcaggacctccctgatcctaggttgctcaggtcccctgtggacctgcctcagtaacaattagtatggctgtcactaattgttagtatcatttacaatttttttttttgagacagcatcttgctctgttgcccaggctggagtgcagtggtgtgatcatagctcactgcagccttgaactcctgggctcaggtggtcctcccacctcagcctcccaagtaactgagacctcaagcacatgctaccacagcctgctaattttttgttttgttttgttttgagacagagtctttctctgtcatccaggctggagtgcaatggtgtgatcatagctcactgcagcctccacctcctgggttcaagtgattttcctgcctcagcctcccgagtagttgggactacaggcacccatcaccatgcctggctaatttttgtattttcttttttttttttttgtagagagtgggtttccccatgttggccaggctgctgttgaactcctgacctcaagtaatccacctgccttggcttcctaaagtgttgggattatgggtgtgagccactgcgcccagcctaatttttgtgttttttgtagagacggggtttcaccatgctgcccaagctgttctacttattgttatattgagggcagggctggcttggtcacagctgtatccccagcatctagcatacagtaggtgctcagttaacactctagggctgatgagcactgtgacagttaacaggattggactcatgcacgttcacggatattcacctgtctgtgccccaggtggccgagagttggccaggttctctttgagggatgtttggtgccatccatgacgcagtcccttgtgacagattctgggaggccctgaggtgttggaagggagtctcccagtgaccccgagttgagggacgtatgagatgggcatactgcacccatcaaagttctgggttccggctggggacggtggctcatgcctgtaatcccagcactttggaaggctaaggtgggcagatcatgaggtcaggagatcgagaccatcctggccaacacggtgaaaccttgtctctcctaaaaatacaaaaattaactgggcgtggtggcgcgtgcctgtagtcccagctactctgaaagatgaggcaggaggatcgctcgtatgcaggaggcggaggttgaagtgagccgagattgtgccactgtattccagcctgggcaactccatctcaagaaaaaaaaaaaaaaaaaaaagtcctgggttctgatactgctccatgctgtaagtgggaatagctggggaatcaaggtagccaggatggtggactcatggtcactgaggcggtcaccacacagctaatatgcatcaagcccttttgcagtcagggagcagtggccccagtgtgtgtgtgtgtgtgtgtgtgtgtgtgtgtgtattggagcaggaacctcagcacccccatgtcctaataaggaaactaagacttcacacagaaaggcagggcacagtgactcatgcctgtcatcccagccctttgggaggccgaggcaggtggatcacttgaggtcaggagttcaagaccagcctggccaacatggtaaaaccccgtctctactaaaaatacaaaaaaattagccaggcatggtggctcacacctgtaatcccagctactcaggaggctgaggcaggaggatcgcttgaacccatgaggtggaggctgcagtaagcggaaattacaccactgcactccagcctgggcaacagaacaagagagagagagagagagagacgctgtctcaaaaaaaaaaaacaaaattaaaaaatttaaaaaattaatccccagcagggagggccagggcacctgtcagagccaacaggggttggagtgctttgaaatgggtcttgcaaggggtggaggagttaagtggggggtgaatttcaatattttgccaacctgagcaactgtacaggtgcaaccagatgttgggggccacaggaaaagcgctttgctcatggcgagtgttcagtgagttttgttttccacaggagccgcccaggaggctcctcaggccgaccccagaccctggctggccaggatgaagtatctccggcaccggcggcccaatgccaccctcattctggccatcggcgctttcaccctcctcctcttcagtctgctagtgtcaccacccacctgcaaggtccaggagcagccaccggcgatccccgaggccctggcctggcccactccacccacccgcccagccccggccccgtgccatgccaacacctctatggtcacccacccggacttcgccacgcagccgcagcacgttcagaacttcctcctgtacagacactgccgccactttcccctgctgcaggacgtgcccccctctaagtgcgcgcagccggtcttcctgctgctggtgatcaagtcctcccctagcaactatgtgcgccgcgagctgctgcggcgcacgtggggccgcgagcgcaaggtacggggtttgcagctgcgcctcctcttcctggtgggcacagcctccaacccgcacgaggcccgcaaggtcaaccggctgctggagctggaggcacagactcacggagacatcctgcagtgggacttccacgactccttcttcaacctcacgctcaagcaggtgcgctggactggggtcacctgatcggggccacctgtccttcttgtccaaattaccacccactcctgagggacccaggggaccagaagtcctcgtcagtccatcacagcccattctgcccctctgctgtcctcaccagcctcgtggagacccaaaatggtcttcttctaggagaggctagggggaagggcagaggagctaggttactagcacagagctcaagcctgatgatgcggattcgaatccaagctctgcctcttacttggtgttcgaccttggaggagttcattcacctctctgtgcctcacttttctcacctggaaaatgggatgtgaatgagtcccacccacctctaagggctactgtgaggtttacaggagatggagtttataaggcacccagaccagtgctggatgtccaactcaacttggcaatgacgggggacacatctccttgtttatttttatgtttatttatttttttttaatggagtcttgctctgttgcccagcctggagtgcagtggtgcgatctgggcttgctgcaaccacctcctggtttccggcgatcctactgcctcagcctcccaagtagctgggattacaggcactcaccatgcccagctaatttttgtattttgagtagagacggggtttcaccctgttggccagggtaatctcgaactcctgacctcaggtgatcttcccgcctcggcctcccaaagtgctgggattacaggcgtgagccactgcgcccggccaacatctccttgtttatttgttccggttctgtctccccatgaggctgggggccttgtctgtttcactcactgctgtgtccctaatgcctagaatagattcaggtgcacagcatgtgctcagtcaagacctttttgatggacaagaacccatgagaggtagctaggcttggtggctcatgcctgtaatcccagcactttgggaagctgaggagggaggatcgcttgagcccaagagtttgaggccagcctgagccacatagcgagacctcatctttttcaaaaaaaatttaattaattaatttttatgtttttttaattaattttttttttttggatggagtctggctctgtcccccaggctggagtgcagtggtgcaatctcggctcactgcaacctccacctcccaggttcaagtgattctcctgcctcagcctcctgagtagctgggaatacaggtgcatgccactatgcccagctaatttttttgtacttttagcagagatggggtttcaccatgttggccaggctggtctcaaactcctgacctcaagtgatcctcctgccttggcctcccaaagtgctgggattacaggtatgagccaccacgcacagcctcgtctctatttttttaaaaaaagaagccatgagaggtgagaaaatcctgcccatctgcagatgaggaaatggaggggctctaagaacccctcctaggtcctcgagtagagcaagacaagtagagacaacattttcaaggaggaacagggaactctgcaggttcctgctcataggaggtacagacaggcctgggttcaagtcctctggtagctgtttctctgcgggtgacctcactgcagttttctctggagagcctctgttccctcatctgtaaataagatagaggaccacttctgcctcctaagggtgcattcaggattcaaggtagggtaagcaccaagcacagcgcccggcaacaaacagatacccagcctgtgtaggttactgtaggggaaactgaggctgaggcgggtaggggccatggcctcttaacatgctgtgttctgaaaacacaaaagtggctaggcacagtggctcatgcctataatcccagcactttgggaggctgaggtgggcggatcacttgagaccaggagttcgagaccagcttcttgggaggctaaggcagcaggatcgcttgaaccctggaggcggaggttggagtgagttaagattgtgccactgcactccagcctgggtgacagagtgagactctgtctcaaaaacaaaaacaaaaaaccctttaaaagtgtgtgataaacatcagcttgacaaatatgaacccagcacccgtgaagcactggcactatgctgggtgctgagggagatggcatgaacagaaaagagagacacaggcccaaggagggaagtccagtgtttggtgggagagggggatgttaacaatcacacaggtcaggcacggtggctcacacctgtaatcccagcactttgggaggctgaggcaggtggatcacctgaggtcaggagttcaagaccagcctgaccaacatggtgaaaccctgtctctactaaatacaaaaaattagccaggtgtggtggtgcatgcctgtaatcccagctacttgggaggctgaggcagaagaattgcttgaacctgaaaggcggaggttgcagtgagccgagattgcaccactccactccagcctgggcaacaaaagcgaaaactccatctccaaaaaaataataataataataataaaataaaaatcacacaaaggccaggagtggtggctcattgcttgtaatgtcagcattttgggaggctgaggtgggaggatcctttgaggtctggagtctgagaccagcctgcgtagcatagcaagatcccatctcttaaaaaaaaaaaaattattagccaggagtaagtagcggcatgtgtctgtagtaccagctacttgggaggctgaggtggaaggatcacctgagcccgggaatttgaggctgcaatgaactatgatcatagcgctacactctagcctgggcaatagagcaagaccctgtctcagaaacaaacaaaattcatacaaatgattatttaacaacagggcttggccaggcagagttggaaggaatagcaatacatgtaaatgtaacaattttccagcatttcttggtgcttcatggagcatggtctccatggattccccaacactcctagaggcacatgataaggcctgtttggagagttgaaaccaaggcacagagagggtttcccaagtaaccccacagggcagggccttaacccaggctggattgtggacacttcctttcctgggcttagtgggctggagtggctaatagagacccaaggccaatttctccagccctcaagcaagcatgccctgtccaccctgcctgcaggtcctgttcttacagtggcaggagacaaggtgcgccaacgccagcttcgtgctcaacggggatgatgacgtctttgcacacacagacaacatggtcttctacctgcaggaccatgaccctggccgccacctcttcgtggggcaactgatccaaaacgtgggccccatccgggctttttggagcaagtactatgtgccagaggtggtgactcagaatgagcggtacccaccctattgtgggggtggtggcttcttgctgtcccgcttcacggccgctgccctgcgccgtgctgcccatgtcttggacatcttccccattgatgatgtcttcctgggtatgtgtctggagcttgagggactgaagcctgcctcccacagcggcatccgcacgtctggcgtgcgggctccatcgcaacgcctgtcctcctttgacccctgcttctaccgagacctgctgctggtgcaccgcttcctaccttatgagatgctgctcatgtgggatgcgctgaaccagcccaacctcacctgcggcaatcagacacagatctactgagtcagcatcagggtccccagcctctgggctcctgtttccataggaaggggcgacaccttcctcccaggaagctgagacctttgtggtctgagcataagggagtgccagggaaggtttgaggtttgatgagtgaatattctggctggcgaactcctacacatccttcaaaacccacctggtactgttccagcatcttccctggatggctggaggaactccagaaaatatccatcttctttttgtggctgctaatggcagaagtgcctgtgctagagttccaactgtggatgcatccgtcccgtttgagtcaaagtcttacttccctgctctcacctactcacagacgggatgctaagcagtgcacctgcagtggtttaatggcagataagctccgtctgcagttccaggccagccagaaactcctgtgtccacatagagctgacgtgagaaatatctttcagcccaggagagaggggtcctgatcttaaccctttcctgggtctcagacaactcagaaggttggggggataccagagaggtggtggaataggaccgccccctccttacttgtgggatcaaatgctgtaatggtggaggtgtgggcagaggagggaggcaagtgtcctttgaaagttgtgagagctcagagtttctggggtcctcattaggagcccccatccctgtgttccccaagaattcagagaacagcactggggctggaatgatctttaatgggcccaaggccaacaggcatatgcctcactactgcctggagaagggagagattcaggtcctccagcagcctccctcacccagtatgttttacagattacggggggaccgggtgagccagtgaccccctgtagcccccagcttcaggcctcagtgtctgccagtcaagcttcacaggcattgtgatggggcagccttggggaatataaaattttgtgaagacttggagatctttttttttttttaagcaaatttacaagtttcaacagacaagtccacattcatccctaaaagtctcattttccagtagaaaatatacactggtaaaaacggggcatggggccgtggctcagggctgtaattctagcacattgggagaccaaagtgggaggatcacttgagcccaggagttctggatcctgtctctgcacaaaataaaaaattactcaggcgtggtggtgctcacatgcctgtagtcccagctatacttgggaggctgaggcgagaggatcgcttgagcccaggagttggaggctgcagtgaaccatgattgcgccactgtactccactgggcggcaataagaagacaaaaacataaaacaggacatgtgtgaggcaaaagctgcaggaatttctatcaggcagatctgacctcatcccacccaccccctgctcagatacccttcatagctccttattgctttcagctcataaccccacatatccccacagacagattctttttttttttttttaagacggattctcattctgttgcccaggctggagtgtagtggcgtgatctcggctcattgcaacttccgcctcccagattcaaacaattctcctgcctcagcctcccaagtagctgggattacaggttacaggcatgtgccaccatgtccagctaatttttgtatttttgatagagacggcatttcaccatgttgcccaggatggtctcaaactcctgacctcaagtgatccacccgccggcctcccaaagatgctgggattacaggcgtgagccacagtgcctggccagccaaagatagattcttgcttccaggttgtcagcagacttaggagcgggaggtacagggtgagatgctcttagctggattggatgctgggcccaccttggcctcctgcttccagcaaggccccctctgaataccatcccagccaccagcagcctccctctccttaccaggcttgccttccctggttggaacctcagatctactgctctctgtagctcatcctttcctcccctcctcaagtgcttattatgcacctgccatgtgctacacgccttgccctgtactcctcctccctcctgtgggaagggtcagctgatacagacccaccttatggtgaggaaacaaacctgaaaatgatcaaatgggaagttcccgggagcaataagagctttgagcagaatttttttttaaattttattttattttatttatttttgagacagagtctcgctctgttgcccaggctggagtgtggtggcacaatctcatctcactgcaacctctgcctcctgagttcaagtgattctcatgcctcagcctcccaagttgctgggattacaggcatgcgccaccacgcctggctaatttttgtatttgtagtacagacagggtttcaccatgttgtccaggctgatctcgaactcctggcctcaagggatccacctgcctcagcctcccaaagtgttgggattagaggcataagccactgcaccagcctgagcagaatttaaatgggataacagggccaaacacagtgactcatgcctataattccagggctttgggaggcagaggtgggaggatcacctgagcccaggagttcgagaccagcctgggcaacatagcgagaccctgtctctacagaaaaaaaaaattagcccagtgtggtagtgcccacttatggtcccagctactcggaaagctgaggtgggaggatcacttgagcctgggaggttgaggttgcagtgagccaggaccatgccactgcactccagcctgggtgagagggagaccttgtttcaaaaataaaatgaggctgggcatggtggctcacgattgtaatcccagcagtttgggaggccgaggtgggcggatcacctgaagtcaggagaccaagaccagcctagacaaggcgaaaccccgtctccactaaaaatacaaaaattagcagagtgtggtggcatatgcctgtaatcccagctacctgagaggctgaggcaggagaatcacttgaacctgggagacggaggttgcagtgagctgagactgagccactgcactccagcctgggcgacagagtgagaatctatctcaaaaaaaagaaaaaaaaaaataggccagccgtggtggctcacacctgtaatcccagcactttgggaggccgaggtgggtggatcacaaggtcagaagattgagaccattctggccaacatggtgacaccccgtctctactaaaaatatgaaaattagccaggcgtggtggtgtgcacttgtagtcccagctactcaggaggctgagggcaaaagaatcgcttgaacccgggaggcggaggttgcagtgagccgagccgagatcatgccactgcactccagcctgggtgacagagtgagactcagtctccaaaaaaaaaaaaaaaaaaaggtggttaaaaatggctgctctggggactggagggagttgggaggatgagacaccatcctgcaaatcaggcctggatgagatggggctgcagggctttctgacaggcacatctgacctcattctgcccctgctcacacagcctctgtggctccctattgccatcaggggagagtcccagctcccctgctccactggattgagtagtgtctggcaagaattcatgtctgagaattcatattcatattctgagaattcatattctgagaattcacctcagaatatgggcttatttggaaatagggtctttatagacagacatgaggttatcatggattagggtggaccctaaatccgatgactgggccaggcacgtggctcatgcctgtaatctcaacactttgggaggccgaggtgggcggatcacctgagttcaggagttcaagaccagcctggccaacatggtgaaaccccgtctctactaaaaatgcaaaaattagctgggtgtggtggcgggtgcctgtaatcccagctacttaggaggctgaagtgggaggatcacttcagcccaggagttggaggctgcagtaagctatgattgtgccactgcactccagcctgggtgacagagtgagaccctgcctcaaaaaaaaaaaaaaaaaaaaagactaatgtgttttgtgatgatcattttctgacatttgttttgtgtctaatgtctaccattctaagtcctcaatgctaaggactcccatgggccttggtagagacctcggttcaagtcctgcacttacccttccctgtctgaccttggcaagcagccctctccctgggcctcagtttccccactttgcgttgcaatgcctctctagttatcaagctcctggaagtgccggtgggtccatggctgctgggggacaagcccacacagggactgactgaggcttgtccctttttctagagaaaatgcaggaagctgctttgggtcgtttatttactaagagacagcaagaaggggtgttacacatgcagggagcggagcgtctggggctcccctggagtgaggacatttggctgtcagtgtccagcatctgtgaaagcggggatcctccaagccagggctagggtgtgatttattctgcagttgactccacaggctgcaggtggcattggtctggggtagatagtgagcacccatcccaggaggtaatcaaaggcctgtagatgcgagactttatggtgctgtgtggcctcaggagctcaccagaccagaccctctgggcctcaggccactctgaggctgcacccaaggaggaatcagtagggacagagggtcagcaggtcttgttgggtacagccactgaggcagcagtagcgtgcagggttggtggcagctgcacggtggtggcggtgatggtgagaggtctggggcaggggctgcaggccaggtcccagcgtgagattactgtcggccaccagcccatggagcagatgtcgtctctccagccactgtagcaactcacctggggacagagtgaaactcagctggaacggaaacgacagaggacatgctaccccatgctgcatgtgcacgaatccacacacatcccactgagtaacccaccaaacactcatgcatgcagataaaaagtgagcactggccgggtgcagtggcttacacctgtaatcccagcactttgggaggccgaggtgggcggatcacgaggtcaggagtttgagaccatcctggctaacacagtgaaaccccttctctactaaaaaaaaaaacaaccaaaaaattagccgggtgtggtggcgggcgcctgtagtcccagctactcaggaggctgaggcaggagaatgacgtgaacccaggaggcagagcttgcagtgagccgagatcacgccactgcactccagcctgggtgacagagtgagactctgtctcaaaaaaaaaaaaaaaaaagtgagcactggcccggctcagtggctcacgcctgtaatcccagcactttgggaggccgaggtgggtggatcacttgaggtcaggagtttgagatcagcctggccaacatggtaaaaacctgtctctactaaaaaatacaaaaattagtcaggcgtggtggtggacgcctgtaatcccagctactggggaggctggggtgggagaatcacttgaacccaggaggtggaggttgcagggagctgggatcatgccattgcactccagcctaggtgacaagaatgaaactccatctcaaaaaaaaaaaaaaaaaaaaaaagcgagcacttattaagcacctactgtacgccaggcacctggttaatcctctcatccactcaactcatgtccacactcacatccccagctgcgtgggtccccatatgccacctgagtgccccatgccctgcccagggagtgtcgggggtcttggagctacagatggtgtcagtttccccaacaggtccaagggtccgtgagacacccagagcaggtcagagacccacccacagactcctcgtggtacagagacatgcaggggtgtacatgtgtctgtgggtccacttcctggtcacccacgcatgtgtggtggacccacagacacacacacacccctacgaggacacacccttgcagaccacctcccctggatccctaacaccgcaagtggagtggcacacagagacatgtggacacgtgttaacacatctgcacaaacttgtcgtatatccctgcaccagggccaggactagggtacagacagggaggcacgaagccatcaggatatttttttgaggccaggcaccgtggctcacacctgtcatcccagcattttgggaagcctaggtgggtgcgttgcttgagcccaggagttcatgaccagccttggcaatacagcaaaacctcatctctgcagaaaatacaaaaattagctgggcataattctgcatgcctgtagtcccagctacttgggaggctgaggtgggaggatcgcttgagcctgggaaggcaaggctgcagtgacccgagatcgtgccactgcactccagcctgagtgacagagcaagactgtctcaaaagaaaaaaaaaaggacttatgaaaatttagagggttgtttaccctctacccaatctgcagtttacaattgacaccagtggttctcaaaccagggtgattttgtttccaggggatacttgtctggggacagttttagatgtcacaacttggatggggtgtgaggctattcatggcattagggggcagaagacagagatgttatctaacaccctacaatatacaggacagccccactaccatatacatccccaaatgtcagcatcagctttttttttttgagatggagtctcgctctgttgccaagctggagtgcagtggcgtgatcttggctcactgcaacctccacctcccgggttcaagtgattctcctgcctcagcctcctgagtagctgagactacaggtgtgcgccacaacgcccggctaatttttgtatttttagtagagacgaggtttcgccacgttggccaggctggtctcaccagcctgagagtagctagtcacagctactcaggaggctgaggtgggcagattgcttgagtctgggaggcagaggttgcaatgagccgagatcacgccactgcactccagcctgggtgatagagtgagaccctgtctcaaaatatatatatataataataataatattaatatttttcccttttttgagacaagggtctctgtctcaggctgagtctcatattgcccaggttggtctcaaactcctggcctcaagtgatcttccctcctagcctcctgagtagcagggattacaggcatgagccaccacatccagcaaggtaagtattttaatgcaatacttttaaaataaaatttaaaatatttgtaaaaaggccaggcacagcggctcacgcttgtaatcccaacactttgggaggctgaggcgggcagatcacctgaggtcaggagttcaagaccagcctggcccgggcacagtggctcatgcctgtaatcccagccctttgggaggccgaggcaggtggatcacgagatcaggagattgagaccatccttgctaacatggtgaaaccccatctctactaaaaatacaaaaaatttagctgggcttggtggcaggcgcctgcagtcccagctactcaggaggctgaggcaggagaatggcgtgaagccgggagacggagcttgcagtgagccgagatcacaccactgcactccagcctgggggacagagcgagactcaatgtcaaaacaaaacaaaacaaaacaaaacaagaccagactggccaacatggtgaaacctgttgtttcacctgttcacctgtctctactaaaaatacaaaaaaaaaaaaaaatcagctgtgcatggtagtgggtgacctggggagtggcctgtaatcccagctacttggaaggctgaggcaggagaattgcttgaactcaggaggcggaggttgcagtgagctgagatcgtgccactgcacttcagcccgggtgacagagcgagactccatctcaaacaaacaaacaaaatacaaaaattagccaggtgtggtggtgcgtgcccgcagtcccagctactctggaggctgaggcaggaaaattgctggaacccgggaggcagaggttgcagtgagacgagatcacgtcacagcactctggtttgggtgacagagcgaggctatgtctcaaaataaataaataaaaataaaataataaaataaagtaacataattgtgaaaagcaatacttttcaaaagcaatacttttaaatacttttaaagctggacacagtgactcacatcgctaatcccaacactttggaaggtcaaggtgggaggattacttgagctcaggagtttgagaccagcctgggaaacagagtgagactccctctctacgaaaaagaaaaaaaaattagctgggtgtggtggcagcacctgtatcccagccactccagaggctgaggcaggaggatggtttgagcccaggaggttgagcctgcagtgagccgagatctcaccactgcactccagcctgggcgtcagagtgagaccctgtctcaaaaaacaaacaaacaaagcaaaattaaggcaaaaattcatgaagatcaaaatattgaaattttaagacaggatctcaccatgtacttgcaagagcctacctctcctgcctcactctgtttctggcccctcagggggactcatgctctgaggactttcttttttttttttttttgagacggagtttcactctgtcgcccaggctggagtgcaatggcatgatatcggcccactgcaacctctgccttccgggttcaagcgattctcctgccttggcctcccaagtagctgggattacagatgtgcatcattatccccggctaatttttttaaaaattatttttagtagagatggggtttcaccattttggccaggctggtctcgaactcctgacctctggggatccacccgcctcagcctcccaaagtgctgggattgcaggcgtgagccaccacgcctggctaacggctctggggactttcacacgcgcgttcacacacactccagtgcggacccacgatctgtgcacgcagccggcaggtgagccctgggcacatgcatgcaaacctgcccacctccctgcacgtgtgcatctgcgcctacgtgcacctgccccacctcggcttcccagagcgctgtccctgcccgtccccactcacggtcgcctccggtcgcaggcctcctggcttcggtggaccagcgggggcccccgcacacgcgcactagcgcgcgtacgaagtggtggccgcacaacttctcacgcatctctggggtgggcgcggggcccaacgcgaacaccagggcagggcccagcagcaccagcgcccaggcgggcagacgggggtccatggtggtgggtggcgccggggccaagcggggaccccctttataggcgcctgggccgtcccagctgggggccttggagaagggacagaacattcttcaggaccgcccaggaaaaaggtcaagggtggggttagtgccagagcctttctcccagggccagggccttggatgtacttctcccagagggagcactgggcaacgagtctttcttttttatttttttcttctttttttttgagatggagtctcactctgtcacccaggttggagtgcagtgacttgatctcggctcactgcaacttctgacacccgggttcaagcgattctcctgcctcagcctcctgagtagctgggattacaggtgcgcaccactatgcctggctaatttttttttttttattttttatttttagtagagactggggttcgccatgttggccaggctggtctccaactcctgacctcaagcgatccatctgcctcggcctcccaaaatgctgggattacaggcatgagctgtgcctggactattattatttttattattattattgagacaaagtcttgctctgtcttccaggctggagtgcagtgatgcgatctcggctcactgcaacctccacctcctgggttcaagtgattctcccacctcagcctcccaagtagctgggattacaggtgtaagccaccacgcccagccacctatttttattttttatttttgagatgagttcttgctctgttaccctggctggagtgcagtggcacgatatgggctcactgccacctccctatccctgactcaagcaattctcccacctcagcctcctgagtagctgggactacaggcccacgccaccacacccggctaattttttgtattttttttgtagagatggggttttgccatgttgcccaggctggtctcaaactcctggactcaagtcatcttcccgcctcagcctcccaaagtcctgggatcacaggcgagagcgaccacaccagggtatttattcatttttgacataggatctctctgggttggcctgtaatggcaggatcatagctcactgtaacctcattcccctgggctcaagcgatccttcagcctctgcctcctgagtagctgggactacaggcctgcaatacaatgcccagctaatttttaattttttaatttttatttttatctttttagacagagtcttactctgtcacccaggctggagtacagtggtgcgatctcgactcactgcaacctttgcttcctgggttcaagcgattctcctgcctcagcctcctgagtagctgggattacaggtgcccaccaccaagcctggctaatttttgtattttttagcagagacggggtttcaccatgttggccaggctgatctcaaactcctgacctcaagtgatccacccgcctcggcctcccaaagtgctgggattacaggcgtgcaccaacgcgcccggccatttttaattttttaattgtagaggcaggggtcttgctatgttgcccaggctcatctagaactcaagtggttctccctactcggccttccaaaatgctgggattacaggtgtgaggcaccacacacggccaagtcttcgctattgtcttaaccagtttaaagagatgaaatagatcaactgaaaagtaataatcctgccttttctggggggcaggggggaagacagcgggcatcttccaagaccagaaatgttcagaattttgttgtttctattactgtacaaatgagaaaactgaggcacacaggccaggtgcagtggctcatgcctgtaatgcaagcactttgggaagatggggcaggtggatcacttgaggtcaagagttcgagaccagcctgcccaatatggtgaaactctgtctctactaaaaatacaaaaattagccagatgtggtggtgcatgcctataatcccagctactcgggaggctgaggcaggagaatcacttgaacccaggaggtggagattgcagtgagccgagatggtgccgctgcacaccagcctggggacagagactccgtcccctcaccagacaaaaagaaagaaaagaaaagaaaaaaagaaaactgaggcacagagaaaggaccccaaacttgcccaaggtcacaggaggctgagcagagcccaggtcttctcaaggcgcctgacacgcagggctgggggtgtcccatccgaagctctgtctccccaacacggttgtcccctctgggtgagcaggggctggtggacccagaatagagcaggatttatttgttcagtggatgcttggcccccgcttcatgcctagggggtcttatagctttgtttttccaaggagggaatctgaggttgagagagggaaggatgcttgaccctaggcaggagagaacctgggctggaactcgagtcttgcttgaccccagagcagctccctccctatttctaccaaattagggggccctctggggctaagagagcagggacagggatctctctctctctctctctctgagtctctctcggccttcatctctcagtttccttctgtatgtctgtctctgtccgcatttttcttttttttgaaacggagtcgctctgtcgcccaggctggagtgcaatggcatgatctcagctcactgcaacctccacatcccagtttcaagcaattcttctgtctcagcctcctgagtagctgggattacaggcatgtgccagaacaccaggctaatttttgtatttttaatagagacggtttcgccatgttggccaggctgatctcatactcctgacctcaagtgatcctcctgccttggcctcttaaagtgctgggattacagacgtgagccactgagcctggccactctccacatctttctagcagttatgaggtgcacatgacgggggccggtcggtggggaggtggtccggccccagtgatgctggtcccctccccacagcctcgctcccccaacctggccttgtcctctgaccaccgggagagcatcctgttccttccccacccacagagagcctgtaatcagctcccccaggctgcagccaaggccagcagctggggctgggagtgagggggctctgtccttgagggccccagccaagccccacccagtggtcctcctccaccagcctgccctggggcccccacagtggctccctgagaggtctctggcccacagctctaaccgcatccctcccagctcacacaccctctgaggctccccatcgccccaagtccagcacaaaatcttttccactgaattcctttattcagtcaacaaacatttccagagccccctctgtactgaggcctcagcccagcccccaaggaaccctgaggtcaggggagacagctggacacagacacttccccagccccagggccagagtggggctggagggaaggacagggctacagtagtagtgggggtatatgagggaaggctgcaaggatgtggtagctggagttttgagagatggataagagttttccaaggaggcaaaagtggcagaaaagctttgcaggtgaggaggagcagcagaagcttaacctgcatgagaatccctctcaccagtcagaaagttgaccctgcacagccaaggggtaagctctgaccattttgcaggggacagaactgagacccagagagggaaaggaacttgcccactgtcacactgcatggaaggggcaaaactgtaggctccaatacttgggctcttaacctccttactctgagccttctcacgcttggcatgctgttccctctgccaggaatgcctttccttcccttgattgcgtgaaaagttcctgccaggtttggtgtcatccctttgtgccccttgtagggtgaggacagaaagggtcccattggacaggtgggaaaactgaagccctaggacactcagataccattagggtggactgggaccccagcctttcctgccccctttcaggatcccaaagagatacacgggctcccctaaaaggcagagtcccagccacagcaactgctcttgtccttggcttcctccagagaaacagagatcggggagcagaagtcagatcatacatttaaagctacatgagggccgggcgcagtggctcatgcctgtaatcccagcactttgggaggccgagacgggcagatcacgaggtcaggagatggaaaccatcctggctaacaaggtgaaaccccgtctctactaaaaatacaaaaaattagccgggtgtggtggcgggcgcctgtagtcccagctacttgggaggctgaggcgagagaatggtgtgaacccaggaggcggagcttgcagtgagcctagattgcgccactgtactccagcctgggcgacagagcgagactccgtctcaaaaaaaaaaaaaaaaaaaaagctacatgaatgtccccattggaaataagacaggaaactcaaaactaggtgctgtagtcccagctatttaggaggataaggcaggaggatcactgtagcccaggagttcaagaccagcctgggcaacgtagcaagatcctgtctcttaaaaataataataataaatttaaaaaaaaaaaagcctgggtgcagtggctcatgcctattattccaacactttgggaggctgaggtgggaggatcacttgaggttaggagttcgagatcagcctggccatcatggtgaaacctcatctctattaaaaataaaaaaaattagccgggtgtggtggtgcacacctgtaatcccagctactcgggaggctgaggcaggagaatcgcttgaacctgggaagcagaggttgcactgagccgagatcgcaccactgcactccaccctgggtaacagagcgaggctctgtctcaaaaataaaaataaaaataaaaaaaataaaaagagagagacagaaaaggaaactcagggggccagggcttaaggggttgggaagatgcgagagtcttaaatttggttccttgcttctttgggccaggactcagagagccccactgacacatatgcccatctgtcttgaaccttaacaaattgcaaaggccacaggctattctacaggccacgggagcccccccaaatgcaatgtcatgggggtgttcctgaagtagaggaccctcataaggcctctgaggcccagagaggggcagctccgggcctaaggtcacacagccagtcaacagagacctaatccagaggtctgcgggcaggagctatgaaaaggacagggagtggtgtttgccctctgggtgagcagtgaaggcatgagtctcacacccccggcttccgctccacagcatgtccagctgggggcccagggcgctgaatgatggccggtcctgtgggctaggggcccagcacagcttcatgagctcgtgaacctgaggggcgggggacagataatggggtcgtgcctgagcagtccaaaggacacaactcccattcagcgtatttgtttttgtttttttgagacggagtctagctctgttgtccaggctggagtgcaatggcatgatctcggctcactgcaacctccgcctcccgggttcaagcaattatcctgcctcagcctcctgagtagctgggattataggcacgtgccaccacgcctggctaattttgtattttgagtagagacagggtttcaccatgttggccaggttggtctcaaattcctgatctcaggtgatccacctgtcttggcctcccaaagtgctgggattataggcatgagccaccgcactcattcagttttaaaacacaaattaaattccatcccatctctgctccaaaaactcccatggctccctatggatcttacttatttatttatttgagataaagtttcgctcttgttgcccaggctggaatgcagtggtgcgatctcggctcactgcaaaccctgcctcctgggttcaagcgattctcctgcctcagcctcccaagtagctgggattacatgcacacaccgccacacctggctaagtctgtatttttagtagagacggggtttcaccatgttggtcaggctggtcttgaactcctgacctcatgtaatccacccacctcggcctcctaaagggctgggattacaggtgtgagccaccgcgcccagcccttatggattttacaacacacttctcctttcgagactaccctgaccaacatggagaaaccccatcttaactaaaaaaaaaaaaaaaaaaaaaaaaaaaaaaaaaaaaaaaaaattacaggtggcgtgtgcctgtaatcccagctactcgggagtctaaggcaggagaattgcttgaacctgggaggcggaagttgtggtgagccgagattgcgccattgcactccagcctggccaacaagagcaaaaccacgtctcaaaaaaaaaaaaacaacaaaaaaacaccacctctccctgatgccctccttcgctcatctccatccctccttccctcatttgttccgggcagtcacatctgcctccatcgcactggtgcttaaaggcacccagctcattacctccccaaggcctttttcccttccgtgtcctccactggaaatttcttctcctagctttactcatgggtaggctcctcctccttccagcgtcggccccgtaagaggccctctttgaccacccccaccccaccatttccctctgttcatctctttcaaggcacttatcactaccataattttgtctttgttttgttttgttttgttttgttttgttttgttttgttttgttttgagacagggtgtcactctgttgtccaggctggagtgcagtggtacaataatggctcactgcagccttaacctcctgggctcaagcaatcctcctgcctcagcctccctggtagctgaaaccacaggtgcatgtcaccacaccggctattgcttgtattgtttgtagagacaaggtctcactatgttgcccaggctggtcttgaactcctgggttccagtgatcctcctgcctcagcctccctagtagctgaaaccacaggtgcatgtcaccacaccggctattgcttgtattgtttgtagagacaaggtctcactacgttgcccaggctggtcttgaactcctgggctccagtgatccttctgcctcagcctcccaaagtgttgggattataggcatgagccatcgtgcccagcctagaatgttcttatcagattttgctagttactgggaggacagggtcttcagcacccaacaagtcctggcacacagttggcactcaataaatgtttttggcctgagcaaattaatttatcaatgaccaactgcatgtcagacacttccacaaaggttatgattatatgattataaaccatgagagggtgggatgtggtggctcacgtctgtaatcccagcactttgggaggccgaggcaggaggatcacttgaccccacgagctcaagaccagcctaggcaacacagagagaccccatctctttaaaaaaattttttaaaattagccaggcacagtggcttatgcctgtaaatctcagcactttgggaggccaaggcaggaggatcgcttgagcccaggagttcaagaccagcctgggcaacatagcgagaccttgtctcttaaaaaaattatttttatcttatttgtttgtttatttatttatttatttattttgagatggaatcttgctctgtcgcccaggctggagtgcagtggcatgatcttggctcactgaaaccttcccctcccaggttcaagcaattctcctgcctcagcctcgcaagtagctgagatcacaggcacccacacatgggtaatttttgtatttttagtagagacagggtgtcaccatgttggccaggctagtctcgaactcctgacctccggtgatctgaccgcctcagccttcaaaagtgctgggtttacaggtgtgagccaccacacctggccaaaattatttttaaattagccaggcatggtgatgtacacctatagtcccagcactttgggaggctgaggcaggagaatcgcttgagcccacgagttcaagaccagcctgggcaatatagtgaggctcccatctctaaaaaattatttttaaattagccaagtgtggtggtgtacacctgtagctcctgctactagagacactgaactaggggaatcacttgagctcaggagttggaggctgcagtgagctataattgcaccccagcctgggcaacagagtgagcccccatctataaaaaagaaagaaagaaagaaaaaaaaaaaccatgaacgtcaccaccatttatggagcatcgactgtgtgctcggctttgagctgagccctcataggcacaggtgttcaggagtctaatcttccctcaccctataaggcattactattctcattttggaaaagggtaaactgaggctctgaaagtgctctgacttgccacacagtgagagagtagccaagtgggggccaggatcctcatcggcctcacactctagcctttcttctcagtacagagactcaggcgccagctggcttgcccgagaccccggcccaatctacagactgggaaactgaggctagccctgcggcgctcacctcagcagggcaggcaggaggcgccggcagcctctggccctcctccagcagttccaagaggcggcagagggcggggacatcccgctcacatcccatcatccgcaggaactcctggagccaaggaggagcgcatgtggtgggggaggagcctccgtgggtggagggggaggggccacccgtggtgggggtaggggccatctgtgatggagcggggaggggctgcctgaaccgtgaaggggtcagaaaggtgaggaagcgtcctccccactggggcctatgatgctgggaccaggtgaccccatgctaaagagggacgcaggcgcagacaggttggagattggccacgaggggcgtggagggagaagaaggctgggggctctgggaagccgactcacggccgaggggctgcagcttttgtcgcagtaggtgaagagctcgtacaggacgaccccgaagctccagacgtctgactggcgagagaagatgttgtccgagagggattcgggggcatacctggagaggggacaaggtcttgagatgcgagggtgtagaaaggacaggaagaggggggcagccttggaatggggaactggtcagggtaggtggggactgtgagcaggtcagtcccgtctccagggtctcggtttccctggctgtgggataggtggattctccagccctgggaggtgcctgggaagagctaaggctgtggggaggaggcgggggcagcacggaggggcggagatgggggcggggccagagccgtgggagggggaggggccagaactgggcggggggaagggcggaactaagagggggccagccctgaggggcggagccagcgtgttggaggggtggggttctgaagcttgggcggggcgagagctgagagaagggcggggctaaggctgggggccgctgacagcagggcagcgggagacagaggagccagtgctgttgagggggcggggctctggggagtgggaggggccaaagctgcagcggaggaagggcggggctaaggctggggagcaaagcagcgggagggggcgggggcatggctgggggcggagccagagccgtggggaataggggcggagcctaggcgcgggttccccaccagaaaatggggctctggcctggctcgcggaccacgtagtagtctttgtcaagcggcagcagcttagctaggccgaagtcagcgatcttgacgtgtgcctcgctctccacgaggatgtttcgggcggccaggtcgcggtgcacgcagcggcgggagcccaggtactccatgccctgcgggcgggcggtgtgagcgtgcagagaggatcccaggataatccggcaggtaccccaagcgtgacctggcaccccaacccagaccccaactataaccctacccccgagccatcctccactgaagttctgatcctgagccctaagccaaccccaccactcccgagacctggaccccaaaccactcctcagccttcaccgcgacctccaagcagacccctgcccaggccgtgccagctgaatccccacaagtcccggggcgccccctcgcaccttgcagatctgcgaggaatagagaaggaggcggctggcatcgaggcgcgcgcggtgccgctgcaggaagtcgcgcaagcagccgctgggcaggtactccatgaccagccgcaggctctggcggcctggagaaggcaggatctgtcacagcagggcccagccctgctcgtccccccattcttcccccctttcacagtgggaccttgtgtccctctcgacctcagttttgctgactgtaatatgggaaccgcaacaatgacacattgctaatatctcttgagtactttctacaacatacattgatgtgtttatatatcacggccaggtgcagtggctcacgcctgtaatcccagcactttggaagcctcacttgaggtcaggagttcaagaccagcctggccaacatggtgaaaacccatctccactaaaaacacaaaaattagccgggtgtggtggcacgctcctgtaatcccagctactctggaggctgaggcaggagaatcacttgaacttggaaggcagaggttgcagtgagccgagattgagccactgcctccagcctgggtgacagagcgagactctgtctcaaaaaaacaaacaaacaacaacaacaacaaagtaaatatcacaatggcccatttttcagctggagaaactgaggctcagaaaagttaaggtttcacaactggtaaggggtagagtcaggattcaaacctgtaacccatgtgaatctggatcaataatcacgttcccagcctacctaaagtggcctggcaggagggtaagaatgtgcactttgaaaagcacccatacgtcttggttcactcatccgggagctggctcacccgggccatagctgacaccacgatacttgacaatgaaatcactgtgcagtgctttgaggatctgaatctcccgctgaaagtccctctgctggtctggcccgctgtgctgcagctgtttcacggccaccagggcacctgtattgtcgcctagcgggtcatagcggcacagctccacgctgccaaagttgccctgggggatagcgggactgatgtccaggcacctggatgctgccctgccctctccaacccaccctggccctgcccaccttaccttgcccagctgtgagatgtacttgaggtgtctctcctcgaagatcgtggggtcttggcaggcatagagctgggcaccattccacagcccatcacgaggtgccagggcaccaggtgtggggtctgagaggagctcatagtctggggtgggggcatgggcagtggtaagcagcgcctctcatcctgggccccactcctgagttgacttgctgtgcaacctccatctgcatattgaccctctctgtgcattatggcagggccattgcaagccaaagggtaccttgtggagactggaaaaaggtgtctcccactctgtcccaggcaaaggaagcctcctcgtgcagtgcacaccctgtgcaactccacatggctacaaagatggaggacataatgagaactcatttccccagttccactgctatgaaatgtggccacatgactgagctcaggctgatggacaagatatgctgggtgcccctccagtcctgacccatggaaacctaatacggggccctccacactctctcttttatctgcagaggatccaacggggacccaacgcctgaggtgagtgcagccactaagtgagaggttcctgtgggcctggacaccctcattgaatgaagactaaatatcacactgggcatggttgtgtgtgcctgtaatcccagctatttgggagactaaggcaggaggattgcttgagccagtaattcaagaccagcctggggaacatagcaaaaccccatcacagaaaaaaaaaaaaaaaaaaaaaaaatccagcctggtgtggtggctcatgcctgtaatcccagcactgggtggctgaggtggacggatctctttgagaccaggagttcaagactagcccggccaacatggcaaaaccctgtctttactaaaaaatacaaaaatttagccgtgtttggtggcacgcccttgtaatcctagctacttgggagtctgaggcgggagaattgcttgaaccagggaggcagaggttgcagtgagccaggatcacgccactgcactccagcctaggtgacagagggagatagtgtctcaaaaatataaaataaaataaaataaaaatgcatacaggcatgcatcaccatgcctggctaattttctgtttgtttgtttgtagagatggagttttgccatgttgcccaggctggtcttgaactcctgggctcaagcgatccacctacctatagctggaactataggcatgagccactgcgcccagccaaacatttttttaaaagaatgaaatagaccagacatggtggctcacacctgaaatcccagcactttaggaggtagaggtgggcggatcacctgaggtcaagagttcgagaccagcctagccaatatggtgaaaccccatatctgccaaaaatacaaaaattagctgggcgtggtggcacacactgtaatcccagctactcaggaggctgaggcaggagaatcgcttgaactagaggttcaaggaggtagaggttgcagtgagccgaaattgtgccactgcactccagcctaggcaacagagcaagactctgtctcaaaaataaataaataaataaaatatcatcatgttgaaccttgaactgaggggactgttcgttacagtagctgttgaagctcacactgactgtcacagtcaccaacccctccaacctcaccagacacacagggcgtggcctgctgcaaaccacgctccttccactgggcccaatatgacatcacagccctccccacccaacccgtcccagcgggcacctgaagagatgaggctattgaggtcacgaatgacggctcggaaggagggcctctggaccggctcataggccatgcactgttgaatcagcagggccagctctgtccacttgggggccggcagctgctgccggtcctcataaaattggagtttctgagggtgagaggagcagtcggtaatccccaacccaatagacccaccccaatctccccagactggatgtcagtctgcccttctgtcaaagtgggggttcggagaccgatgccgggtgaggggctctgaccttagcaggatccagggcactgatgggcatggtgacgccactaaacacttcccagaccgtggcgccgaagccccacttgtcagcttccaagctaagtgtctgcgcctcccggagacactcgggggccacccaggggatcctgtcggtgagcactgagggaatgaaagtgggatcagggatccacttccttgccctgctcagcccctccctcctccacctccaggaacttactctccaggcttaacacagcggggctgaccccagggtcactcagcttgatgaagggcgggctcccatcagccccctcccgagccaggagcaccttccgggcagagacattgccatggggcaggcctttgtcctcctaagggggccagacacaggaaaatgcccgggagggtttgatgaatgaagagtctgtttggcaaactcctatacatccttcaaaacccacttggtactgctcagacatgctccagcatcgtccctgactcctgacatcctgtcttgcccctctagttcaccccctacactgacctggctatgtccctccccttctcaaacaccaccccatcctgtgactccccagtgcctttgacacaaagtgaaagctcctcagcctggcattcaaggcccttgctcaagcttccaatgaacttcccttccacacttgcaccctggtctcctgccaacagaactgcctgataggccccaggggatgcaacacactatctagcctgcaggcctttgcctaggctgttccctcagcctgacattccttccttcctttcttctcttgatgaacttctactcaacttttaaggccctatctccaatgttccttcttctaggaagcctttcttcctgcccagcctcgtcattcaccacacgccctgacatccaagaatgacttgttctcttctagtgttctcacaacctgaacctaaaatgccctcccctcgaacccttaccaaactcctatgcatactacagagcccactcccaattcctcttccacccagagaaagccttccctgggaatggagggtggagcaggcagaggagcactcaccagatagttgagggcgtaggccagctgtttgaccacctgcagcttccagctggctggcaccaggtggccacgttttcgcagatacatgtctatggcccccaggtgtacaaattcctgcaccatggtgcctggttggcagcagggagaggcggggttgggagactgaactgcacttgtgttgaggaggttctgccaacaccctggctctcagggtctctcaaactctcatctctgtctgttccctcccctgctgcctctgttcatacagtactcacctctcctcccacctccatctctgaatgatttgcctggaatgcctggaaggtgttgagccctgtctgtatctgtatctcacttttttttttctcttttcttttgagacagagtcttactctgttgcccaggctggagtgcagtggtgcgatctcggcttactgcaacctctgcctcccgggttcaagtgattctcctgtctcagcctcctaagtagctggaactacaggcgcatgccaccacacccggctgattttgtatttttagtagagacggggtcttgccatgttggccagactggtcttgaactcctgatctcaggtgatccactcgcctcggcttttcaattacaggcatgagccaccacgcccagcctctgtatctcacttctaaccctttgcatattctgtgtcctctgcctagaacacccctcttcctttcctaatccacacttgtccttatctttccaggttagaatgcatctctgtcttcccacaagcattgcccaacccccaggctggcccagcagcctctctgaccatccacagtgctccgtgctgccctcctcacacctcatcacaccctgcctgtcacattctaggctctgtcccagctcctggcccatcctagactcccaaccaatgaaaccaaggctcagaaaggttacgtgacctgtacaaagctgcagagattagaaagccaggtttgtctgacttcaggtcattctggggctggatatgggtgagaacctggagccgctttccaaggagtgatgatggagagacataaataaagggtaatgaacacggctcccatccagggtggcccagtgtgttgctggggctgtcatatagcggctcagaacagaggtgggaagaacagcctagacttgggtgaggcaggggtggggtgggtgggtggggggctctcactgtctccagccatgcacacgccgtggagcagcacgagatgccggtacgacacttggctcatcaagctcgctgcttccaggaatgactggggaaggtgggaagggagagaagatgcgtgggtttcttccactccaataatcccaaattttgtgctcacagacctgccttaggggaacacctggccacaggtcacctttggccctggagtctgccattagtgcacacagcactaccatgattttctgatacgggacagaagttcccactatcatctatggttttttgttttgttttgttttgtttttgagacagagtctccctctgtcacccaggctggagtgcagtggcgcgatcttgactcactgcaacctccgcttcccagattcaagcaattctcctgcctcagcctcccgagtagctgggattacaggcatgcaccaccacgcccggctaattttgtatttttagtagagacggggtttctccatgttggtcaggctggtctcgaactcccgacctcagatgatctgcccgcctcagcctcccaaagtgctgggattacaggcgtgagccaccgcgcccggcctaaaatttttttgtcaagacgaggtctcgctatgttgcctaggctgttcttgaactcctggcttcaaaccatcctcctgcctcagcctcccaaagtgctgggatgacaggcatgagccaccacgcccaggtccctgtgtgtttttaaatttctctgcatccacgaccccctctccagccagccccgactccaaaagtctggtccacattgctctcacctccatgcagttcttgtgcttggcatccatgaccttcagcagcacctctgtctttcgggcctccccatccaccacctcatggcgacagccccggtaaatcttggtgaaggacccatggcccaggttctcatgctgaatggtgaggggacagcagaagaggccagtgagggggttcctgcaggatcccagcccaagcgagacatagctgctggccccattttacagatgggaaaaccgaggcaaggtaaaattatagcatatgcctgaggccacgcatctgagtctctggaccccagactgaggtatcgcctcatttcccagggcctcttacccactccaggctgtcagcagggatcttgtgaaatgtcatctgactcagctggtattgggattggggctgaaccaaggatgatgtgggtgggctgtgacctctctggaccacgatcaggttggacttttctatggggagaggatgagggagaaaaaccagaaatcagaggtgaaaagtccccaagggttagctaactcatgccttagtttgaggtaccctctagaagccgaccctgagatgaagacttcagggcacatggctttttgttgttgtttttgttttgttgttgctgctgctgttgagacggagtctcactctgtcatccaggctgggtgggcagtggtgcgatctcagctcactgcaacctccacctcccaggttcaagcgattttcctgcctcggcctcccgaatagctgggactacaggtgtgtgccaccgtgcccggctaatttttttttttttttttttttgagacagagtctcgctctgtcacccaggctggagtgcagtggtgtgatctcggctcactgcaacctctgcctcctgggttcaagtaattctcctgcctcagcctcccaagtagctgggactacaggagtgtgccagcacacccagctaatttttgtatttttagtagagatggagtttcaccatgttggccacgctggtctcaaactcctgacctcaggtgatccatctgcctcagcctcccgaagtgctggtattacagacgtgagccactgtgcctggctggcacatggtttatttgaaaggagatccagaaagcccccatagggatttgggatgagcgacaaggaaggaaggagccctgcagggggctttaatgagcaagtggcactgtggacaaccagggatcggttctaccagggattctgggagactcagaagaactcacatctcagaattgtcccatcagaggggtttgtccaggagtgaaattcacccagaggaagagctgagagctggagagagactaggtgcagatgacatggctcacatctagctgtgcctagatcaagccagacctaaaggttatatatctctaacttcctgagccaacaaatcaccttttcttccctaacccaccttgacctgcagtttctgccacttgccacccacacaggagctgtcacagacatagaaagccagggtcccagatcagccactcattccaggggaggaaggggctcacctttgggtctggggatacagcaggaagtgagggtcactgccaccccatctacgtgcagccccccatcccagcaggttgccaggagctctcgaagactgctgtggggtcggctgaggccaaccagaaggaaggttcctgtggggctgcgccggatgaggcagcccttataatcaggaccaagggggttctgcaaagaagagtggcccctgagtgggactgagcgacagacactctccttctcagtccttcttccttttttttctttttttttttttttttttggagacggagtctggctctgtcacccaggctggagtgcaatggcgtgaccttggctcactgcaacctccgcctcccaggttcaagcgattctcctgcctcagcctcccgagtagctgggactacagatgcccactaccacgcccagctaagttttatatttttagtagagacagggtttcaccattttggccaggatggtttcgatctcttgatctcttgatctgcctacctcagcctcccaaagtgctgggattacaggcgtaagccactgtgcccagcctcagtcctttctcctaaagcaccatgaactcattccagtctttagacctttgaatatgctgttctgttcaccgggggtgtcttttccctcctattcttcaggaaccaaatgctgactgatcttttaaatctcaattcaaacgtcacctcctccaggcagccctccactacccaccctagcagtagaccgacctggacacagacagtgaggaggaagctgtcaaagtcctgggggctgcggcggagaacataggagccaggacgtgagcccccagtcttgagcttgttgatggcaaagtccagactgtgggggaaggtgagagggaatggggaggagtcagagatagaagaagacagagagacctgggctcaaattcaggtacctctgtagccctgggatccttgccaggtgacaccctccccccatttataaaatcagccatgggccaggcgccgtggctcacgcctgtaatcccagcattttgggaggccgaggcaggtggatcacgaggtcaggagatcaacaccatcctggctaacaccgtgaaaccccgtcgctactgaaaatacaaaaaaatagccgggcgtggtggcgagcacctgtagtcccagctactcgggaggctgaggcaggagaatggcgtgaccctgggaagcagaggttgcattgagccgagatcgtgccactgcactccagcctgggcgacagagccagactccgtctcaaaaaaaaaaagaaaaaagaaaatcagccgtaagtcttggcctcttctgggagattgtttgtttgtttgtttgttttaatagagacagggtcttgcttggttgcccaggctggagtgcaatctcagctcactgcagcctccaactcctgggctcaagtgatcctcctgcctcagcctccggagtcgctgggactacaggtcaaccaccacacccagctatttttttttctttttttgtagagatggggtctctcctgttgcctagacttgtctccaactcctgagttcaaacaatcctcctgccttggcccctcaaagcgctgcgattgcaggtgtgccccactatgcctggcccttcctgggagattaaacaagaggctgtaggtgaaggtgggcgacttgtccatctccaggaaatggccctggggtcagagagagagagagtagtggtcgccctgtgaagcagaaggaatacttcagcttcactgagcgctgactgtgcggcaggtgtggtttgaaaacttgacccctgtccagggctcctggaaggtgaggacactgaggcatagagaaggggaggggccctgagtggccacagaggccgggaatgggggacaggtccttacgtgatggggccgtggcactgctcggccacttcctccagcagcctcggcggtgccacctccttgcagaagaagtgctgggagtccgtggtcagccggaagtagccgtccacgagcgccacgaacgacagagcctcgggcagccctgggaactcggcctcctgcgagggacaagcgtcagagcccagtgaaacccgagggtgccggtcccgccctcggggtaaggctgaaggggaggggaatcctgcacccactaaaatctggttgtctgtcctggtaacagtgaccaggcggtgctctccggccgggccaacgcgcggggcctgcttgatgctaatgtctacgatttctggaaagtcgcagaagggctggaggacctgggaaggagggggagtaccgaagtgggggcccagctggaccccgccaaaccacgcccatgaacccacccccaagccacaccatccactccctatccctttgccattcaacccttccaagccgcgccccctcctatcaactccaacctctcaacacctcccctacccatccccaaacatctcccacccgctctgccaatccccgcctccttctctctgccggaccccgccccttgatccctgccccgcttcgcagcctcccagctctcggagcctcactctgcctcttagtcttgcctcgttccagcgcccacccacccactcctcaacccctcccattttcattcccgggtcgctcagcccaacccttcactcagtttgcccctcccattcccgcagtctcctccctcactaagccccgcccctcattaagcctcgcccacttccccaagtctttcgttttggctccgccccacatcccctaccactctccggcccctccccgagccccgcccccacgttggccccgcccagcgggggagtccgccctcacctcctgttctccctgggtccaggcgatgccgccgtcaccagccacgcggagcagccccagcccgtcgtggccaccaagggccccagggaggcccacgtggaaggtctcggcggccccggctggatccagccgctccaggtccatgatgtacttggccatgagcgagtgccggtctgcctggcaggcggccacgcggcgcagggctctgcgcaccgtcctccgaatacgcctccgcgtcacgaagctcaggccctggatcaggtcgcgcaggcttgggggtaggcaggccttgtagctgcaggggttggaggggagggagccggccctcagcgtcgggaggggtccccgcggggacacacacaaacccaggctttagcccaggggctggggtgcggccctagttggggcaccaggcacacacagactctcattcagggtcaggtatgaggaccggacctcagagtaggggagggccattggcgcccacaggtcggacagggaccccacaggccttttagctgggggaggtcaggtgtctgtccagctggagcctgggggtggagagggctgggttcgtgggaggccctgggtcataggaacaccctgaaagcttgcaggagaactccatggtgggagcccggcaaagccccgatggagcccacgttgctcactcccaagcagaggccgtccccacagcctggtggctctcacctgacagtcttcagcagctctcccggccgctgggcctgctctcgcgccatccgggccaggtccaacacggccaggctgagacactcaccctgctccttgagactgaggcccacggggaggcgcccactcaccaggtcactgcggtgctggggggccgccacagggagcatcagctgaggccacccaacttcaagccctgttgttaacctgcagacccccccaatcctgggctgacccccacccctggactgccacagggagggtcagacgaggccccacctgattgcatgccagtcctcatgttgccccttggacccccaaccccctgggtcaaaccccaggcagaaccccacctgggcaaagaggtgctccaggactggcaggtcaaggatagcactggccaaatccttgcgtagcccgaagcggtggcacttctccagcccaaaccaattggggaagtaaaagctgtgaggagaggagagaaccctgggatgaaagtgcaacccagcctcagtaggagtgacattatggtgggggcgagggacagattctgcggaggcctcacagagcccagcttgtacctttaacttgctgtgtgaccttgggcaagtgacccaccctctctggtctgtttcctcatctgagaaatgggtagtgaccatacctccctggggcaggggtgtgggcacctcgaaatgcaaggagatgataaaattgtacaatccctgggggctggggggcacttcctaccgaatcctgtacagcaggacttgggtgctggcatcctccacggagaagatgtggctcggggggaaccagcaggacaggtcctccgtggccagagcaaagagggagtggtacacaggcaggatgcctacaggggatggtcccatcagctccctcctgagtcaccccatctgtgcccttcaggagtgccagcatcatacccaaccgtccagatccttccatacctcaaggtatgaccagctgttcccttcatgtgccgtcacacctctccgtctgcacaggccattccctctgcctcagaagccaaccctgcacacccttctccattacaaaactcctactcatcccccaaagccccagctccgatgctgacttctgcaggcaactattccagcttccaatcttggccccacacagccccatccttccctctggcccgatccactagggatgcactcaccgctggccttggcagcctgcacgcacaggtcctcagccaagtggtccccaaaggagaaagataggcgctgggggggcccggggccccgagcgggcagcagcacatgcagggcaccagcctccgtggacaagaggctgcatgaacgctgagggatcaggggcgtctcttcacttggaggtgccatgagtgcaacttgcctggggcacagagagaaaaagcccctcagtcctggtcagaggggattggacttctgagcagggagggcatggaaaggagtgctggaggccgggtgcggtggcttatgcctgtaatcacagcattttgggaggccgaggcgggaggatcacttgaggtcaggagtttgagacctgcctggccaacatggcgaaaccctgcctctaaaaagtgcaaaacttagccgggtgtggtggtgcgttcctgtaatcccagcaactcgggaggctgaggcaggacaatcacttgaacctgggaggcagaggttgcagtgagccaagattgtaccactgcactccagcctggacaacagagtcagactctgtctcaaaaaaaaaaaaaaaaagaaagaaagaaagaaagaaagaaggaaagcctccctgggatgggcccaggaggaaactggccccctgcttccagcccccaacacctcccacccgctcgctcacttgccctgagaaacctcagcactcagggccctcagctgggtggggccaggggtggggcttcgagtcccctgagaaaaattggggagaaaaaggaggtcactcaaattgacctgaatgaagaagatctgaagaaagtgttgggaaaaacaaacaaaaacctaagttccagcagggcgcagtggctcatgtctgtaatcccatcatttccggaggccaagaaggaaggatagcttgagaccaggagtttgttttatgttttttgcttttttgagacagagtctcgcgctgtcacccaggctggagtgcagtggcgcaatctcagctcactgcaacctccgcctcccaagttcaagagattctcgtgcctcagccaccccagtagctgggattacaggtgggcaccaccacgcccagctaattttcttgtatttttagtagagatggggtttcactgatctcaaactcctggcctcaagtgatcagcctgcctcagcctcccaaaatgctggattacatgtgtgagccaccgcgcctggccgagaccaggagtttgaaaccagactgggcaatatagtgagacctcctctcaaaaagaaaaaaaagccttgtaatcccagcactttgacaggccgaggcaggtggatcacttgaggctaggattttgagacctcatctctaaaaaattagcagggcatggtggcacacccccatagtcctagctacttgggaggctgagacaggaggatgccttcagctctgcaagttgaggctgcattgagctatgatcacaccactgcactccagcctgggcgacagagcaagaccttatctctagaaaaaaaacacaatacaaaaactatgatccaaaataatgccctgtggctggggtggggcggcattaatgagggtttttttgtttttgttttgagacagagtctagctctgtcatccaggctggagtgcagtggcacaatctcggcttactctgcatcctgggttcaagtgattctcctgcctcagcctcccaagtagctgggattacaggggcacgccaccatgcccggctaatttttgtatttttggtagagacggggtttcaccatgttggcgaggctggtctggaactcctgacctcgagtgatcctcctgcctcggactcccaaagtgctgggattaccggcgtgagaaactgcgcctggcctaatgaggtttaagacaatcagaggactaggacccctaggactcagctttcgcagctgtgaaatgggctgactccccagcatcctcattgaggtggtctgctgagcgcaatccaggcctaaagtgtcaactcaattaatgtgcattaatttgtatatttcttgatgatgtgccggtaagcgatcaacaaacgcctgttaaaccaaacaggaagggcaattggcacagcggtgtggtggttactgtgggaagggaagtcttgtgggggaaagaaccttaccaaagggacactttgatgtcaccgatgcccagaccaagaatgagcacattcctagtcccgggaaccttggaggagccccatctctcccacagagagattgatgtctagttttgccctttatagaaataaaatcacacaccatagcctctctatcgtcccctcaacatcagccaatcaagttttttggtttgtttgtttgtttttttgagacggagtctcgcactgtcacccaggctggagtgcagtcgcacgatcttggctcactgtagcctctgcctcctgggttcaagcgattctcatgcctcagcttcccaagtggctgggattacaggcgcgcaccacagcgcccagctaatttttgtatttttagtagagacggagtttcaccatgttggccaggctggtctcaaactcctggcctcaggtgattcgcctgccttggcctcccaaagtgctgtgattacacacgtgagccacattgcccagcctttttatttatttatttattttgtaggggggaggacggattcttgttctgtctcccaggctggagtgcagtggcatgatctcggctcactgcaaactccacctcccaggttcaagcgattctcctgcctcagcctcctgagtagctggaattacaggcacccgccaccaaacctggctaatttttgtgtttttagtagagatagggtttcaccatgttgaccaggctgatctcgaactcctgacctccagtgatccgctggcctcagcctcccaaagtgttgggattaaaggcatgagccactgtgcccagccccagtcgagtttaaaataaggcttcagtggcagtggcgccccactgcaatcccagctactcagggggctgaggcagcaggatagcttgaggccaggggttagagacctgcctgaacaacatagcaagactcccatctccaaaacaacaaaaaaatcttaacagaatattattattctgtaatactgtaacaaaaaaaaatgaaaagtcagaggtgatgtttggtcccagaaaacgccatagtttttttggttttttaaaaatgtttgtagaaatggaggtctggctatgttgcccaggctggccttgaactcctggcctcaagctatcctcccgcctcggcatcccctgtttataatcctcaacgttctgcatcctggtatggtcgggtaccctgtgtctggaccgggaaggcctggagggtaggggctgggaactccgccccccaatccctccttcccaatccctcctccccacccccaaccccgcagcccccgtcgcgcatgcgcaatgactcctccaggtccgcaaggcaggcatctcccggccttagtcaaagccgaagcccagagaagcgagcgatcggaggatgcgagtctcggctcacgtctgcctcgcagctttcctccgaggcctggaaggcgagctagcctttgccctggcagcaccctgccccagcccagccatcccccgccaccaccatcctcccccagtgtctgggccgagccctgcggcatcgccagctcttacctagcgggcagggaccctggactttcgaagggcgggcagagccgggaggcagcgagaggaaagtcccactcggctccttcctgtgtgggccccttggtttcctgagccactgtcatttaccgaaagtcagggccctgcgggagctgggggcggggaggcgggcaaggaggggcagaaagttccggaagcctctgcatcagccgccccgttcagacaggctgctggagacccctaagccaaaggaactgatgatagcacagagaagggtctgggtcacaccaggggctcagccgactctagacccacttgttaagtggggctctggcccggcccttattgcctcagtttacccatctgtagcatgtgtgagttgggcacccagtggaactaattttgcacccagggaaggaaacctggctggatttgcccaggagggaagcagggaagttgccccagaggaaggtcaagttcttctttgaggtatttctcccttaagactcagggagacgctgggcgcagtggctcacgcctgtcatcccagcactttgggagactgaggcgggcgattacttgaggtcaggagtttgagaccagcctagccaacatggcgaaactccgtctctactaaaaatacaaaaattagccaggcgtggtggcctgtaatcgcagcactttgggaggctgaggcgggcggatcacttgaagtcaggagtttgagaccagcctggccaacatgatgaaaccctgtctctactaaaaacaggaaaattagccaggcctggtgatgcctgtaatcctagctactcaggaggctgaggtgggaggattgcttgaatctaggaggcggatgttacagtgagacgagatggcgccactgcactccagcctggcaacagagcgggacttcgtttaaaaaaaaaagaaaagactcagggagagataatgacccatttctgcctgtggtgccctgggcccagccctaaaaaaccaggtggatccggcctggcctcttggaacttgtgatctggcgctgagacaatgagcaaatgaaggagccaaatcatcgcagacaacaaagaaagccagggtgtcaggacaggcacagactggaacttggacccgaggcaggacagggagctggccagggaaagggtgctccaggaggagggcacaggatgggcaaagaccttgagagggcagtgatcttagcagcttgaagagcagtcaggaggccaggggcaggggtgagatgagggggaaggggactgcagggcggtcaacaggggcaagatcgtggggggacagggggatcagggtctttgggagaagggtgggttttgcctggagcataatctggagccacaggagagttggaagtaggagctgttataaatagaagaggcagaaggcccgggcagcatccaaatgcagagacttgggccagtgttcttaggataataggatcagagccccggaagtagagcttcaggaatagactgacgaagtggtgaccgggtacagtggctcacatctgtaattccagcactttggaaggcccaggtgggaagattgcttgagcctaggagttcgagaccagcctggccaacatggtgaaaccccatctctactaaaaatataaaaattagctgggcgtggtggcatgtgcctgtaatcccagctacttgggaggctgaggcaggagaatcactggaacccaggaggcaggcggaggttgtagtgagctgagattgtgccaccgcactccagcctgggcgacggagcaatactctgtctcaaaaaaaaaaaaaggaatagatttaagaagttgtggccaagaacagtggctcacacctgtaatctcagcactttgggaggctcaggcaggaggatggcttgagcccaggtgttcgagaccagcctgggcaacatggtgaaaccctgtctctacaaaaaatacaacaacaacaaaataataagctggatgtggtggcatgtgcctgtagtcccagctactaggggaggctgaggtgggaggatcacctgagcccaggaagttgaggctgcagttagctgtggtcatgccactgcactccagcctgggcaatgggagtgagatcccgtctcaaaaaaaaaaaaaaaaagacttttcatctctgtatcaccatcacaagtcttaacacaaaatggtttggtaagtattttgttgatcttaactgttcaatcagccagaggcttattggacacagcctgtgtgcagggaatcggggacaatgcagacccaatccctgtccaggggagctgacagtccagcaggggagatggcaataaacaagctattgcccaataattatatcagttgcccctgggaccggtctgctaagagagatgactggatctgggagggcttcctggaggaggtggctttgattctgaaatccaacaacaagtgggactagccagagagtgacctgagaatgtgggagtgtgggcagttctggcaggcagaacagcccaggcaaaggcctggaggcttcacgaattcacagtgttcctgagaagagcaggatgtcagggacacggggggctgagactcatttgatggcgtgggtagggccgcgtgggtcaagggaaagagatatagattatgtcctcagcttagtggagcttagtggagccacagctgacctgcggcaggaagtgccaagcagaagcttagttgtagtgttttctttcacttcctgggtggcttcagcagacgggaatgcaaccttatgttctcatccttggcctgaggctgaagcctctgctttccggaagtacagtgagtttctgggtctctgctacctccagtgtgatggtttctgcaatattttgagaataagtaagaggagattggggtgaggaccaaagtggtaccttcagccccagagaagggcatgtgaaggctctaaaaggaagttctggccgggcgcggtggctcacgcctataatcccagcactttgggaggccgaggcgggcggatcgcctgaggttaggagttcgagaccggccttgccaacctggtgaaaccccatctctactaaaaatacaaaacgcagctgggtgtggtggcgggcgcctgcagtcccagctactcaggaggctgaggcaagagaatcacttgaacctgggaggcggaggttgcagtgagccgagatcgcacaactgcactccagcctgggcgacacagcaagactccgtatcaaaaaataaataaataaataaataattttttttaaaaaaaggaagttctggggacagaacccagaacttgcccgagaaaaatggggcacgtcagtgatgcaaacacccagatttttctgctgacaagaagtccataaatacaatcaaagaataaaatacaatcaaagtgtaactggaaacaaaattgaactcatggataaaatatcctcgttatataagtaacatctagaaagcagtaagaaaatgccaaccagttaggtggatatgaatccagaagtcagagaaaatggaggacaaatagctcttaaacccagaaaaatttcctcagcttcacttgccaaatgaaaattaagagtacagtgaggcagggccaggcacggtggctcatgcctgtaatctgagcactttgggaagtcaacatgggaggatcatttgagctcaggagttggagattagcctgggcaacatggtgagatccgtctctacaaaacatacaaaaattagccaggcatggtggtgtgcacctgtagtctcagctacttggaagactgaagtgggaggatggcttgagtccaggaggcagaggttgcagggagccaagatagtgccactgtactccagcctgggcgacagagcgagactacatctcaaaaacaaaaacaaaaatggtaaaagactgaataacttcctcctgagattggaaacaagacaaggatgtccattttcaccacctctattcaacattgttctggtgatgttagccactgtaataagaaaagaaaaagcaggctgaggcaggagaatggtgtgaaccagggaggcggagcttgcagtgagccaagatcgggccactgcactccagcctgggtgacagagtgagactccgtctaaaaaaaaaaaaaaagaaagaaagaaaagaaaagctgggcatggtggctcacgcctgtaatcccagcactttgggaggctgaggtgggagaatcacaaggtcaggagttcaagaccagcctgatcaacatggtgaaaccccatctctactaaaaatacaaaaattagccaggcatggtaaaaatacaaaaattagccgtgcgtggtgatgcgcgcctgtaatcccagctactcaggaggctgaggcaggagaatcgcttgaacccgggaggtgaaggttgcagtgagccaagatcgcgccactgcactccagcctaggtgacagagggagactctgtctcaaaaaaaaaaaaaaaattaaaaattggcagggtgtgatagctcacacctgttgtcccagctatttgggaggctgaggattgcttgagtcagggaggacaaggctgcagtaagccatcatcacaccattacactccagtctgggcaacagagcgagatcctgtcttaaaacaaaaaaatatatgagaaaaataaacaagtcaggtgtggctgggcatggtgatacatgcttgtagcctcagctactggagaagctgaaatgggagcccaagaatttaaaggcaacatagcaagattctgtaacaagcaaaacagaataaaataagtaataaaaaaaaggtaaataaaactgttgctatttgctgatgatatgattgtttatgtcaaaaacccaagggaatctataagacaactactgaaattaatacataaattcagcaagttaccaggtttaaaaagtccgttgaattcaatacaaaagtcaattgaatttttatacaccagcagcaaacaattggaacataaaaaaattttgaaaaatttcctttgcagcagcactgaaaaagataaaatactgtgatggtctgagagtttgcgtctccccaaaattaatacattgaaatcctaacctcgaaggcggtggtattcagaatcggaaccttttaagaggtgattagatcatgagggttgagctctcatgaatgggattaatgcccttataaaagaggcccctaggctgggcatggtagctcacgcctgtaatcccagcaccctgggagaattgcaggctggtctctgacaaacaacttgtgtttgagaccagcctgggcaatgtggcgaaacaccacctctaccaaaaaaaacacaaaaattagctgggcatggtggtgcacacctgtagtcccaggtcaggagtttgaggccagcctgatcaacgtggagaaaccccatctccactgacaaaacaaaattagctggatgtggtggtgcatgcctgtaattccagctacttgggaggctgaggtgggagaatcgcttgaacccaggaggtggaggctgcggtaagccgagatcacaccattgcactccagcctaggcaacaagagcaaaactctgtctcaaaaaaaaaaaaaaaaaaaaaaaaggccgggtgcagtggctcatgcctgtaatcttagcacttcgggaggccaaggtgggtggatcacctcaggtcaggagttcaagaccagcctggccaacatggtaaaaccccgtctctgctaaaaatacaaaaattagctgggtgtggtggcgcacgcctgtaatctcagctactctggaggctgaggaaggagaatcgcttgaactcgggaggtggaggttgcagtgagctgagatcgcgccactgcattgcactcaaggttgcgtgacaggaaagaggctacatctcaaaaaaaaaaaaaaaaaaaaaagaaggccagggacctggagtccggagtgcatacaagtgggtggctttgcagtgttttgaggaccaacggtcagaaaccaagatttgggtgtcttgggcccagccttgggaaggcactggtgccagtaactgagatgagggaaagagtgggaaggatgaggcacatcagcattgtgaacgctccgtgatccaagctgtggcttggcccaggatcctggatgaacaaactggtgccttcaaagtccctgggaaaaagacaggggggacaggggtgcccttggacagccctgctaaccaggaactcctcgcctgggccccactggatggtgataacagagacacagagtagcccaggaccagcctgctcaggtcagattcctgcatggcccgaggtgggggcagaggaatcctgccaggccaggtgtgtcactaggaagccggggccacggcatcactcaggcaccgacaacatgtaaaagaaagaaaaataataaagcttttttttttcttttaaattaagacagtttcactctgttgcccaggctggagtgcagcggcatgatcttggttcactgcaacctctgcctctagggttcaagtgattctcgtgcctcagcctcccgagtagctgggattacaggtgtgtgtcactgcacccagctaatttttgtatttttggtagagacggggtttcaccatgttggccaggctggtctcgactcctgacctcaagtgacctgcccgcttcagcctcccaaagtgctggggttacagatatgagccactgtgcccaaccaaaaagaaaaataataaagctctgggccgggcgcggtggctcacgcctgtaatcccagcattttgggaggctgaggtgggtggattatctgaggtcaggagttcaagaccagcctgtccaacatggtgaaaccccgtctctactaaaattacaaaaattagccgggcgtggaggcagatgcctgtaatcccagctactcaggaggctgaggcaggagaggatggcttgaacccaggaggcagaggctgcagtgagctgagattgtgccactgcattccagccttggcaatggagtgagactccgtctcaaaaaaaaaaaaaaaaaggaaacaagaaaccctgtctctacaaaaattagccaggcatgatgatgggtgcctgtaatcccagctactctggagggtgaggcaggagaatcgcttgaacctgggaggcagaggctacggtgagatgagatcacgccattgcattccagcctggggaacagagtgagactccatctcaaaaaaaaaaagaaactaaagaaaaataataaagctttgaaacaaacagcacatcacgacccgtgcccttccccaccctggcatgcccctccctccactccaacccaggccttgaaggcagaagcacgaggccccaaggccagggctgggtctcagggatctccctctcgtcttcttcctcctcccctgtcctccctaaattccttttcctgccccgttcctgctgtcccaggatccaatttgtgctccaggctgcgctctgccctttccagcatctctttccacctgcttgtagccgctcagcactttggggaaactgaggccagagcggtgagttccagcacagagggaagggcagggcctcaaccttcccagtccaaacaatcatacgccatttaaatctcacaacaaccctaaaagctggcgactattattggcctcattttgtggaaggggaaactgaggcccagagcggcaacgcggccagcgaaccatcggtaagatttgaacctggttgtgtatcattcaacggtctagcgcttggcctcagctgggccaccgcagatgggacatggttctgctgccacctggtggacactcgcggcagcgctgttgggatagagccgcctctcacctgacgtcctgccccgaaaagcccagccagaggagggctgacctgctcccctggcctccctgccccgcatcacgcccatcagttttccgaattttcacagtctaagtgtccaccaggaagggactgggtaactaaccacctgtgctacagttgggctaaagattttagtgcaaaagttaatttgcccacctcacaagaaatactaaaaaaatgtatattttttcgagacagagtctcactctgttgcccaggctggagtacagtggcacaatctcggctcactgcaacctccgactcccaggctcaagcgattctcatgcctcagcctctcaagtagctgggactacaggcacccgccacaatacccagctaatttttgtattttttaatagaagcggggtttcaccatgttggccaggctggtctcgagctcctgacctcaggtgatccacccacctgggcctcgcaaggtgctgggattacaggcgagagccaccgtacccacccaaaataaattctttaggctgaaaacaagggaccccagacatgtattccaatccacgtgaaaatctgaagaacacatataaaggtaatgtatgtaattttaaaagattgcataaggccgggtgctttggctcacgcctgtaatcccaacacttcaggaggctgaggtgggcagatcaattgagcctaggagttcaagaccagcctgggcaacacagagagaccttgtctctacaaaaaatacaaaacttggccgggcacggtggctcacacctgtaatcccagcactttgggaggccgaggcgggtggatcacgaggtcaggagtttaaggaaaaaaatataaaacttagctgggtttcatggcatccgtcctaactactcgggaggtctgaggtgggagaatctcttgaacctgggagttcgaggctgcagtgaacagagatctcgccactgcactccagcctgggcaacagagtgagatcctgtatcaaaaaaataaggctgggcacaatggctcacgcccatgatcccagcactttgggaggccgaggcaggcagatcacgaggtcaggagattgagaccatcgtggctaacatggtgaaaccccatctctactaaaaatacaaaaaattagccgggcatggtggcgggcacctgtagtcccagctactcgagggggctgaggcaggagaatggcatgaacccgggaggcggagattgcagtgaactgagatcacgccactgcactccagcctgggtgacagagtgagactccgtctcaaaaaataataataataaataaataaaaataagatctgccagtgacagtggctcatgcctgttatcccagcatgttcggaggccatgacgggcagaccacttgaggtcaggagttcaagaccagccatagccaacatggcgaaactcttgtctctactaaaaattaaaaaaaaaattagccaggcatggtgccgcacatctgcaatttcagctacttgggaggctgaggcaggagaatcatttgaacctgggaggcagaggttgcaatgagccaagattgcaccactgccctccagcctgggtaatggagtgagaccctgtctcaaaataaataaataaaaataaaatgtagcataaatgcaaatttcttctctctttgcctcttaacatatttaaaaagcaattgtacaaaactatatattggccgggcccggtggctcatgcctgcaatcccagcactttgggaggctgaggtgggcatatcacctgaggttgggagttcgagaccagtctggccaacatggtgaaaccccctctctactaaaaatacaaaacattagccgggtgtggtggtgcacgcctgtaatctcagctactcaggaggctgaagcaggagaattgctcgaacctgggaggtggaggttgcagtgagccgagatcatgccactgcaatctagcctgggtgacagagcgagactctgtctcaaaaaaacaaaaaacaaacaaaaaaacaggctgggtgcggtggctcatgcctgtaatcccagcactttgggaggccgaggcgggtgggtcacctgaggtcaggaatctgagaccagcctggccaacccagtaaaaccctatctctactaaaaatacaaaaaattagccaggcgtggtggtgcacgcctgtagtcccagttactcgggaggctgaggcaggagaatcgcttgaacctgggaggcagaggttgcagtgagctgagatcacgctgctgcactccagcctgggcgacagagctaaactccatctcaaaacaacaacaacaacaacaacaaactatatattaattgtattgttgggtctacaatatagagaaaggtaacatatttgacattaacggcacaaaggaggtgaagggagccaagttgtactggaataagaaaatcattgggccgggcgcggtggcttacgcctgtaatcccaacactttgggaggtggaggcaggcggattacctgaggtcaggagttcgagaccagcctaaccaacatggtaaaaccctgtgtctactaaaaatacaaaaattacctgggcatcgtggcgggcgcctgtaatcccagctactctggaggctgaggcgggagaattgcttgaacccaggaggcagaggttgcagtgagccgagatagcgccactgcactctggcctggggaaaagagtaagactcagtctcaaaaaataaaagaaaaagaaaagaaaagaaaatcacacccagtagtgacttgaatccacaaaaccagattaagagaaccagaaatgcaaaataagaaaatgaaaataaaaaattgcatgcttgctgtcctttattttctttctttctttctttcttttttttctgagtcggagtctcgccctgtctcccaggctggagtgcaatggccagatctcggcttactacaacctccatctcccaggttcaagcgattcttctgccttagcctcccgagtagctgggattacaggcgcccgccaccacgcccggctaatttttgtatttttagtagagacggggtttcgccatgttggccaggctggtctcgaactcctgacctcaagtgatccacccgcctcggcctcccaaagtgctgggatgacaggcgtgagccaccgcgcctggtcttttttttttttttttttttttgagacagagtctcactctgtcgcccaggctggagtacagtggcgcaatctcgggtcactgcaacctctggctcctgggttcaaacgattctcatgcctcagcctcctgcctctttcctcttaattttacttcatagccttgtcatcagggagttgtttgcgggtgtttcttttttcatatctggtccccgtcctcatccccaggagggcttctttctgcccaagcaaactgctaagtccaagcccctcaaagtgggcggctggatcttgatccattctccggctctccgcgcgctctcccccaacccctgctccctcaggttcttatgaactggaggcagacagacagagtttgaatcccagctactacgaaacacaaatcggaccccaaattaacaaaaacagcattccagagcttattcaatattcgtgctgcaacatcgctaggagaaaaatatattatttgtattcccattttacagataccctcaggtatctggtggagacctccgtaacacacctccccggaggatgaggccccgagtgtgaagcatcgggatctcacggtaaacaccgcagccacccgaggtagcttaggttcaatgcttaggcatcctgcaggcggcgcgcgccgccgcccctagttgcagccgggactggcggagtgcctacaactcccgacgtgccgcgcgcgcagacgctccgttgcggtcgtggtggaacaggtggagcttgcctcgttgccttctgggaaacgaagtctcgctgaagagaggcggaactttgagtagcaggtggatccatagccaatgaagacgcgggtcgctttgagtgcggggcagagaagccaatggacgtgcggcattgagagggcgggtcttccggtagtgaaggcctggtgaacggctgcgcgacagaggacacttccttttgcgggtggcggcgaacgcggagagcacgccatgaaggcctcgggcacggtaaggcgggcgcggcgcggcagggggccaagggatggggcacgggccccatcaggggcctgcataagtggcgtgggccgggttggtgccgcgcgcttctgtttgggccccccttggccgcgcgccgccttctcttgttgcacccaacatggcggccatcgtgggagccgcgtggagagagcgatgcgtgacctgggccagctcagggatcgcgggggcccaaggactccgggtcttcttcccgggggaaggaataagtcgcgcagcatagaggccctagccccggcacctcgtcgagccgccaagtttctgttttcctttctgcaacgtggacgtggcggtagagcaatagtgtgttttctttctgccggaatggctgtgagaagcagatgaaaattgctaacagtgagccgaaacggggagcgtgaggcttaacgctgtggtacatactggatagaatcaaacggctctatggcgcagagataggagaacctggactcccatggagtgggtgtattatgtccagatctccagcttcggtttccttgctgtcaaaggggcgggccccattgttcccttcctgaacgtgtgccgaggccggtgggtcaggttcacagtaaaagtaggaactgcgataatttgtgactatttttcattgataactagtgaaaagctggcgagtcagtttcagaggtggtttctttgtgccatatcacagagcctggacttgaccaaagattctcacctctgcatctgtaaaccgggagtcttccctgggccaaacgtttggattgcagttgggaaaacggaggcagccgcagctcgcgtggcaacagtgcagggatcccagggctggggagagacctgaggtcttgtcctagttctgcctggaatgggctgtgagatcccatgctggtcactgggcctcagggtgaaagaagatgttggctggatgttttgaggtgcagagtggctgtttgacggcgactgcaaagcaattcaggactgcagcatgaagaaaggaggctgtgggtctaagccacagctttcctggtctgaaacccttagcccaggcaaaggagaggcaggcaactcaattaatcctccctggagacctccctctcctcagttcattttgtgtataaagttgtggtcgggagtgtgacctacagtcaccaagaatccacatggaggccctagggtggccctgcctcctgcttcccgaatctgtggtcactagatgtaggaaagggagtgaggtggatctccacagttgcctctgggtgctggccttaccctcactcctgtttcctttcagctacgagagtacaaggtagtgggtcgctgcctgcccacccccaaatgccacacgccgcccctctaccgcatgcgaatctttgcgcctaatcatgtcgtcgccaagtcccgcttctggtactttgtatctcagttaaagaagatgaagaagtcttcaggggagattgtctactgtgggcaggtatggagaggccggggctacgtggggtctggagtggatttgcgcctcttgggacatcgtgcatctcaagaattaatcagacatcgaacgggtgcggtagctcaacgcctgtaatcccatcacatcagacatcagagccccgggttgtgtttctgcctgggtcacgggactggagcagagcttatgtgccatttccctgattagaaagccagggacccagggagcgggtgggtggcatggtgggacaccttggttggtgctgtcttccctgggccctgtctgttaagtgaggagaggtgatggctatctggtcagtgggtggtagctaggttggcccagacaggttccaggagacttgagttcaggaactgcatctggggctgggttggtgtccgtggcagaagcctggacttcaggctgttgccatgggaagttcccttacctcacgctccctgaggatgcctgaaggtaggtggggctgggaaactgaggcacaagagtctggccatagagtaggcctggagcctggggtgtgctttagaggcagagggttcagtgaggatggggctagggcacatcggcttgctgctctcacatctccctgtggcctctccttggcaggtgtttgagaagtcccccctgcgggtgaagaacttcgggatctggctgcgctatgactcccggagcggcacccacaacatgtaccgggaataccgggacctgaccaccgcaggcgctgtcacccagtgctgtaagctgcctgtcccgcctccagctttttagaccctccttgactccctcacactgaggcagggcaagtgccagaggttcccagtgcaggagagtctcaggactggtggcggggcacaggaagacaaaaggatgccccaggccccagatggcgcttttctgagagccctgccaggctcggttgtaaatcacatcacatctggaaactccctttttgggtctgcaccttgtttagactgggatccacatcaccactgttttctgggacccactgagaaccgaattgaacccctgcctagtgttgggagctggcaccttttccctggctcacctgccagggtctgtgagacccccacacctccctgattgcacctaaacccaagaatcactgtttcttatagcggtggtttaaacagaggtgcaaacagcaagcggatcttgtcgcctttggggggctgtggccgtgcccctcaaagtgaatttggaggttccacaactctagtggccagtgactgcagggacccaggccttgggctatctcgcttccccaccaccaccttcccgtgagccccgagccctcaggcagttgctgtgaccaacaggatgtgtcaggtcattgggcaggcactcaggaggtttgctgaatgcccagagcccaggcaacaccgtcaccctggccccgctcctttccacagaccgagacatgggtgcccggcaccgcgcccgagcccactccattcagatcatgaaggtggaggagatcgcggccagcaagtgccgccggccggctgtcaagcagttccacgtgagtgccctgggggactcccctggagggaagtgcctgctctgacgcaggagcccagtggggggcggctacaccttggtggccccacaggatggggtgttaagaggcttccaaccccctcaacatgcctcccttcctcacaggactccaagatcaagttcccgctgccccaccgggtcctgcgccgtcagcacaagccacgcttcaccaccaagaggcccaacaccttcttctaggtgcagggccctcgtccgggtgtgccccaaataaactcaggaacgccccggtgctcgccgcatgttttctttgcacactgcagagctcaaaggggtgctatgagaggccggcccagtcagctcctggggtgcagctgagctgccatttctttgtcctgggaggggtcttcagtgcaaacaaacaaaccctcacatcctcctgtcctggagtgggccctccaggcgcccccacccctgagctccctcttgcttggtcagttctcagccctgctggcagccctgggctatgagctgcaggggtactgtctgtcctgggccctaaatctgtcccaactgccttgtgagacacaggcctcccaggctcccctgctgagtctggaccagggagaatctccctagatagtggggttggcgttcactccctggggattctcctaagtctctggttcccaaagttttcagagtagacacaagtgggcacccgaggggcgctctctgctgcttgggggctgtttccctttcactggttgggggcctcttagatgacgccctcatcttgcccaaggaggtcaaggactcaccacaggtactcatctctgggaaactgcctcaggcctggaaaattccaggcatgacactaatcccaccctggctgagtccttctgtcaggtggaggctaagctggcattggagaagtttgagacacagccaagagctcaggctctgggagcctcccatcctttgttgcgtgaccttgggcagccctgttctgggccagcggcccttctggggcttgctgtcttgatctcaacatcgggttccacattgatgtgggaagtgacgctgtgcaggtgctggggtcagcctatggggccctcctttgtcccagagagcccaggaccaggaggaagccaggactaggtagtagttacggctttttgaaacagggtcttgctctgtcgccctggctagagtgcagtggagagatcgtggcttactgtagcctcgacctcctgggctcaagtggtcctcctgcctcagcctcccaagtagctgggactacaggggcaccaccacactcagggcaaggacacagcctttcctctacctgtggaggagctgtgtggtttccaggaaaccaggccttttccagcctcacctgtggggtgttgtaacacccaggaacttggagaggcgcccagaacctgggcagggtcagcacacaagcacccattctgcgtaagacccaggcctgaggacagccctgtagaccacagaaccccacgggtcccgtccccaacaactggctccttcccaccctagggccttcgcacttgcctggaatactacagattcccccaggctggcctcactcgagttttacaaactgcacgtgggttcccgggactgggctatatttgatttctatcccccactagttctgagagggcaggggctgtgtgtgtcacccagtgtatccaggaggggctcaactttccatggtatcctttttgtttcgtgaaagctctttacatatgcggggcaaaagcttgagaagagtcatacattttcccaggatatctttctttttttgagacggagtcgcgcttggttgcccatgctggagtgcagtggcacagtctcagctcactgcaacctctgcctcccaggttcaagggattctcctgcctcagcctccagagtagctagaattacaggtgcctgccaccacgcctggcaaattttttgtatttttagtacagacggggtttcaccatgtgggccgggctagtctggaactcgacctcatgccacctgctttggcctcccaaagtgctgggattacaggtgtgagccaccccgcctagcccaggatatcttttgatgttccttagagtatattggatggggggtgctagctggaaatcttaaaattttgcctgaatttcattcatcttgtggtttctagtacaaactctcctttctccataagggaatcttcatacttaagtgccacccagaaaagaaaatacatttcctaacctccatagctatggccaggtgtggctcatggctgtcatctcagcactttgggaggctgaggtaggaggatcacttgaggccaggagtttgagaccagactggtagacatagtgagaccctgtctttaccaagtaacattagctgggtgttgcggtgcacacctgtagtcccagctacacgggggcctgaggtgtgagaatcacttgagcctggaggttgaggctgcagtgaaccatgatcatgccactgtactccagcctggaaacaagacgagaccaaacaaaacaaaaatacagtactgatgtgccatttctgagaaagaacgcctctggctggtgtggacatgatggccagtgctgcagcagtcattttggactatgaagaagcaacacacaggagcagtgagggagaaggatctccggtacttgaccctgtgcagtgctgcccccgtccctgaggcttgacccttctacccccttgattagaacacggggaggagacatgagtcctgcttaggctgtaatggagctgctctgttagatgtgaccttaccttaccttgagctgggcctgaagcagggcgtggcactgtggactcaggccgtaactgcctggaagtccctgccctctctgagccatttcttcctgtataaagtgagggcggtgatccctccaggctgcagggcaggcgaggtgatattaggtgagttggaggatgagagatcaggagagtggaaggctcacggccccaccaaagcccactgcataccctcatctccacctcagtcccctccctgtgccttggagcccctccagggcttcaaccacgtggcagcagcctgggaaccacttgggagagctctgccccaaccagctgagacatggaggccaatcccattattgaggggccattgacaggatgaatgtgctcccagatcactagcctgcacctattcacctaccttggcacactcagcctctcataaatgtgcccagaagcccctctaccaccgaattcccccaccccctgccaaaccccatccttccattcagtcagattcctccaccatccaaccagctacctgtccatccattcgtccactcaatccacccaccccatccattcatccttccactcatccacctacccatccatccatccacccaaccatccagccatccatccagctatccacccacccacccatccatcaactcacccatccatccatccacccatctatccatccatccatctacccacccacccatccacccacctgcccatcaacccacccacccatctatccatccatccatccattcacccattcaaccacccaccagtcgatacatacatccatttatccatccatccatctatccacccacccatccatccatttacacatcctcccatctgtcatgtcaaatcctctacccaaactccacgcgcccacccccaccccacacacaccatccctttgttgcagcctcaattgtccttgagtccctactttgtgcaggggcctgcgttaattccggtgtgggtgattgaaggaatagacagaccctggttctttctcaggagggagaggaacagtcacaaccccatgcagaggctgggcgtggtggtggtgtgcccatagtcccagctacttgggagtctgaggcaggaggatcacttgagcccagaaggttgaagttgcagtgagccgtaacctctccactgcactccagcctgggcaacagagcgagcccctgtctcagaaaaacaaatagaaaaaataagcaaacaaaaagaactgcccctggctgttgagagaaggtacaagaccaaccagagcaaaagccctgggtctgggcagaaatggatcctttcacgtggctgtgagtggggccaataaggcagaggctggccagcgagaacctggatgtccgctggggtctggagcaggacaggtcctacccgggctcacccagttaacccaaggataagcaagggcaggaatccaggaactcctcccacctcctcaggtgctgaggcgctcctgggtctcgttcctgggcttgtcaaggtgccaggtgtcacctcagtagggccgtgatccctgggggagcgacattcaaagcctcccctccctgacccgccctgcacttctgctcctgagtcagaaccagtggggacaaaggcagtgccaaagcaggacagacgagtagggaccccaagagaccccagccccagttcctgcaaccaagagagactatatgagaatcacagaatctgagactcacagttgagtctcaggacttagaattatggaatctttttttttttttttttttttttgagatggagtttcactcttgctgcccaggttggagtgcaatggcatgatcttagcttactgcaacctctgcctcttgggttcaagcgattctcctgcttcagcctcccgagtagctgggattacacatgcctgccaccatgcctggctagttttttgtgtttttagtagacacggggtttcttcatgttggccagggtgggcttgaactcctgacttcagatgatccacctgcctgggcctccaaaagtgttgggattacaagcgtgagcaccgtgcccagtcgaattgtggaatcttacagacagcagcagcaacaaggaagaatagtttgcatttatttatttttttagagacagggtcttcttctgtcgcccaggctaaagtgcagtggcgcaatcaccgctcactgcagcctcaacctccccagctcaaccaatccttctgcttcagcctcctaagtagctgggaccacaggtgcacaccaccaaactcggctaacttttaaaaatttttggctgggcatggtggctcacacctgtagtcctagcactttgggaggcagaggtgggtggatcatgtgaggtcaggagttcgagaccagcctggccaacatggtgaaaccccttctctactaaaaatacaacaaacaaacaaacaaacaaaattgtagagttggggtctcactatattgttcaggctggtctccaactcctagcctccagccatcttcctggcttggcctcccaaagtgctgagattacaggcatgagccaccgaaactggcctttttgcacttgttgagtgcagagttgaagttcaaggacagattctggctccccatggcgtgggttcaaatcccactgtcactcctagctcacagaaggggaattgatgtccagggccacccagcaggtcgtgctgcagtcacagcagctcacaacttctcaccccaacccctgctgcatctcccagggaaccaaggggcaggggacagcgccccgacactgccaccactctcccattcctgcacattctgctcacattgtctgccgcggccttgggcccttcctaactcacatcctggggtcctgctgcccgcttctgtcattggaatcacagtcaaggaaggtgtgacctgattctccccactctgctgcttttcctctccaggctcacaattccctccgctagggcaggagatggtcctgcacactctgcaggggccttcactccaggcctccttaggaattccaaagtgctttccaaatccacccccctccccccactcggcagccaccccactcccgccacttggatatgacccatttttcagaatctagaaatctcatcagactcctcacctgctccaaactctcctacagttccccagcaccctcagaacaaaatccacaccccttccggaggcccagaagataccccgtgattgtctgtctctgctcaacctgtatccaggctggaattcactggtgtgatcactgctcactgcagccttgacctcccgggctctggcgatcctcccacctcagcctcccaaagtgctgggattataagtgtgagccacagtgcccagctgaaatcagtatttatctgctggtgaggtcagggccatcaccaccctggggtgggtccacctggatcatgctgtgtccccagcacctgccggagggccctgcacacagtatgcactcaatgaaccggcctcagcccaggcctctggccgcagcctggaccccacggtgggaagaagagaagctatgccttcccagaacttccctggagagaaggggtccatttacatgtatttgcacaatttgcatatgtttacattggtcggcagggctttgcaagtaggggatcccgctcggatctcccattgattgattgattgattgattgagacagtctcgctctgtcgccaggctggagtgcagtggcacgatctcggctcactgcaacctccgcctcccgggttcaagcgattctcctgcctcagtctcccgagtagctgggactacaggcgcgtgccatcacgcccggctaatttttgtatttttagtagagacggggtttcaccacgttggcctggatggtctcgatttcctgacctcgtgatccgcccgcgtcggccccccaaagtgctaggattacaggcgtgagccaccgcgcccagccttgatttttatttatttatttgtttatttatttattttttgagacggaatctctctctgtcgcccaggctggagtgaagtggcgcgatctcggctcactgcaacctccacctcccgggctcaagcgattctcccgcctcagcctcccaagtagctgggattacaggcggccgccaccacgcccggctaattcttgtatttttagtagagacggggtttcaccatgttggccagactggtcttgaacggatctcaagagacccgtccgcctcggccccccaaagtgctgggattacaggagtgagacaccgcacccggccggatctccccttttccaacggggtttccaggaggatgcctgaccagggtggaaggagaaagaactaggtgcctaacccactctcctggcgagggcaggaggtacgctccagccggcaacaggtgcccgcgtagccgccgcagtgtcacagccccgggggagggacaggtccaccctgcacagcagagagggagcaagaggactgtccgggggttacgtggggacgcgttgagaaacgctggacccagctggagcggccagggcagagggtaggccagaggaggccaccagggagcagcagaggctggcgagaagcgctcaaaagccctttttttttttttttttttttttttggagacggggtcttgctgtgctgcccaggctggagtgctgtgcagttctcgaccacagctcattgcagcctcgaacttccacgctcaagcgatcctcccacttcagcctcctgagtagctgggattacaggcatgtgccaccacgcctcgctaatatttgtatttttcatacagacaagatctcactatgttgctcagggtagtctcgaattctgggactcaaatgatcctcccacttcagcctcccaaagtgctgggattacaggcataagccatcatgcccggcctctgacgctgtttctttcaacccccaggatttcagattccaccagcttatggagaagggaaccaagtttgagatgcgtgattgcccagaaagttggaggctgagctgagacttgaacccagagaccagaacctccagaggtcaaagtcctcctgggtcccccagagaagggccctgagatgacagctcgttggtcctcatggaagcgtgacccccccagtagactttctcccacacccaaccttggtttcctcatctatatgatagggacaagccagactctacctccctggtggtcatggtctccgcttattcgggttcataaccttaaaggcccctcgcaccacctcagtgagccatttatgcctggcacagggccaactctcagtgcatatctgcaaaggaaccaatgaatgaatgaatgaagtgacaaatgaataaaggaataaatgaatgaggcacttatcatgtaccaggctttcgttaccacgtcccatttattcctctgaggcagggtctattttatccttgttacagatggggaaactaaggcccagggaggagcaaagtcttccccaagtatgtacccactcagaacttgagctctgaatgtctcccacccagcttagcccaagagcggggttcagtgatgcccaccccctaaggctctagagaaagggggtaggcccacatgccagtttgggggtggtaaagccaggtaagttttctttatgggtcccctgaaaccctgaaagtgaaccccagtcctgcatgaaagtgagctccccatagctcaaggtattcaagcacaatacggctttgagtgctgaagcaggctgtgcaggcttggatagtgacatgccctctctgagcctcaatttccccacctgtcaacagcagacagtgacagctgtgatcaggggatcacagtgcatggggatgggtgggtgcatggggatggaggggcatttgggagccctccccgataccaccccctgcagccacccagatagcctgtcctggcctgtctgtcccagtccagggctgaaagggtgcgggtcctgcccgcccctaggtctggaggcggagtcgcggtgacccgggagcccaataaatctgcaacccacaatcacgagctgctcccgtaagccccaaggcgacctccagctgtcagcgctgagcacagcgcccagggagagggacagacagccggctgcatgggacagcggaacccagagtgagaggggaggtggcaggacagacagacagcaggggcggacgcagagacagacagcggggacagggaggccgacacggacatcgacagcccatagattcctaacccagggagccccggcccctctcgccgcttcccaccccagacggagcggggacaggctgccgagcatcctcccacccgccctccccgtcctgcctcctcggcccctgccagcttcccccgcttgagcacgcagggcgtccgaggacgcgctgggcctccgcacccgccctcatggaggccgtggagaccggggaacggcccaccttcggagcctgggactacggggtctttgccctcatgctcctggtgtccactggcatcgggctgtgggtcgggctggctcggggcgggcagcgcagcgctgaggacttcttcaccgggggccggcgcctggcggccctgcccgtgggcctgtcgctgtctgccagcttcatgtcggccgtgcaggtgctgggcgtgccgtcggaggcctatcgctatggcctcaagttcctctggatgtgcctgggccagcttctgaactcggtcctcaccgccctgctcttcatgcccgtcttctaccgcctgggcctcaccagcacctacgaggtaccggacagaggcccgggggtaggacctgccccactggcagtgctgggaccccgtgtgggggaggcgctggggctttgggccgctgtacaggaggacgcggatggcacctcggtgctttaacggaaggggcccctaggcagacacgtggggagggttctaggaagaggccccaggcgcccggcgaggggcaggaaggaggaagagagagcctggcgtcctgctccttcggtggaagcgcgcgcggggcggggcccggctcgaccaggtgtgtcctcacgggtggacacacacctgccccccacctgcccgggcgtgcagacccacgtgtgcgcgctagaggggactgctgacggctccggggttcgaaacctggcttcactgctttcttgtatcttgggcaaggggcgtgcctctctgtttgggtttcccagctgtccaatgggcgaattacaggacctccctccaggggagagggtaaagcgattaaaatcgtgaccggggcccggtgcggtggctcacgcctgtaatcccagcactttgggaggccaaagcatgcagatcacctgaggtcaggagttcaagaccagcctggccaacatggcgaaaccccgtctctactaaaaatacaaaaattagccggatgtggtggtgggcacctgtaatcccagctacttgggaggctaagacaggagaattgcttgaacccgggaggttgcagtgagccgatatcgcgtcactgcactccagcctgggcgacagagcgagactcttgtctcaaaggaaaaaaaaatattgtggcagggcgcagtggctcacgcctgtaatcccagcactttgggaggccgaggtgggtggatcacgaggtcaggagttcaagaccagcctggctaacatggtgaaaccccgtctttactaaaaatacaaaaattagccgggcatggtcgcgcgcgcctgtaatcccagctactcaggaggctgaggcagaagaattgcttgaacctgggaggcggaggttgcagtgagccgagatcgtgccagtgcaccctagcctgggcgacagagcgagactccgtcccccctcccccccaaaaaaatcgtgacaggtatatcctaggcggccaacaccattggcccggggcactgtctacactgtgcgcttgcgggccacgtcggtgtctgctgagcggtggctgctccaggagcccgcgcccgtcaggcgcaagtgggagggcgcgtgcacacgcatggaccagtcctccaggtccacggggtacgcacaggcacgggatggcacctgtgcacgggtgtgtgcgtgcggcggggcccccacgtgcaagaatctggcgggcgcggttggcttccggagggaggggcccacctagagagcagaccagggacccgagaggcctcggctcctgggtaaggactgtccaggtgacctcgagtccctccttgcagtacctggagatgcgcttcagccgcgcagtgcggctctgcgggactttgcagtacattgtagccacggtgagtggcctcggccccgccctccgctcagggccccgagagcgtcagccttcactagcccggcccccaccattcaagaccccgcccagaccccgccccccatgctcccgttctgaccccgcccccatcagtcccctcccacaccacagccggcctgaccccgcctgcactctggaagacccggcctatctgccccgcccatattctgggaccacccttctgcctcctctccccatccccaactcgcccagacgccctccctgctcacccgccccacactctgtctacagatgctgtacaccggcatcgtaatctacgcaccggccctcatcctgaaccaaggtgtgactctgggagattagggaagcatgtctgggaagagaaagggagggagaggagaacccaagactaagtttgcgccccgcccaggggcctaacagggggacctctttttgcatagtgaccgggctggacatctgggcgtcgctcctgtccaccggaattatctgcaccttctacacggctgtggtgagtggccctgggaactcactccatacgggggatcgggcccactgtgtctcttgtggggagactctgggcttgcccctttctcctgaggaagcctctgtcccagctgggacccagtgtcctcatctttatagtgaaaaatgatctgaaaagcttattgctgagaatctagaggtatggtagcttcaggcatggctggatccaggcttccacctcttctggcttccagtccagcaggaagtgagctcctgcttcatcctggggctggctgaggtcccagggagggctacctttggctggctcaggtctgaccttgatggcgatattatcatcgtagtgataataatagtaatggcggccgggcgcggtggctcacgtctgtaatcccagcactttgggaagcagaggcaggcggatcacctaaggtcaggagttcgagaccagcctggccaacatgatgaaaccccgtctctactaagaatacaaaaattacctgggcgcagtggcacgcgcctgtaatcctagcctctcaggaggctgaggcaggagaatcgcttgaacccgggaggtggaggttgcggtgcgtggagattgcgccattgcactccagcctgggcgacagagcaagactccatctcaaaaaaatataataataataataataatagtaatggcagcaatcactcactgacactcgtatatgtcaagtcatattccaaatctttttcacttattaacttgtttaattctactgggcacagtggctcatacctgtaatcccagcactttgagaggccaaggtaggaggatcacttgaggccaggggttcgagaccagcctaggcaacatagtgagacccccccccgcccccatctctacaaaaaaaattttttttaaattagtcgggcatggtggcacctgctgtagctccagctactccggaggctgaggcaggaggatcacttgagcctaagagttccagtctgcagtgagctgtgatcacaccactgcactccagcctgggcaaaagacagaaaccttttctttaaaaataaaataactaacttaattcttacaacaacacagtaagaaggtattattattaatcccactttagagaggaggagactgaggcatagaagggcatcagtcctaggcaccactgaaggccaggtcccccatctaaccgcccctctccctctctctgtcccatgctgcagggcggcatgaaggctgtggtctggactgatgtgttccaggtcgtggtgatgctaagtggcttctgggttgtcctggcacgcggtgtcatgcttgtgggcgggccccgccaggtgctcacgctggcccagaaccactcccggatcaacctcatggagtgagtgaaaatgcagaggatactccagcaggatggggctgggaccagtgcggtggctcatgcctgtaatcccagcactttgggaggccgaggcgggcagatcacttgagctcaggagttcaagaccagcctgggcaacatggtgaaaacccatctctacaaaaatacaaaaattagctgggcgtggtggtgcacctgtggtcccaggtagttgagaggctgaggctggaggattgcttgagcccggtaggtggaggctgcagcaagctgagatcacactactgcactccagcctggatgacagagctagaccctgtctcaaaaaaaaaaaaaaaaagaggctgggtgcagtggttcatgcctgtaatcccagcactttgggaggccaaggcggggggatcacctgaggtcaggaatttgagaccagcatgaccgacatcgagaaaccccatctctactaaaaaatacaaaattaggctgggcgcggtggctcacgcctgtaatcccagcactttgggaggccaaggatggcagatcatgaggtcaagagattgagaccatcctggccaacttgatgaaagtccgtctttactaaaaatacaaaaattagctgggcatgctggcaggcgcctgtaatcccagctactcaggaggctgaggcaggagaattgcttgaacccaggaggcagaggttgcagtgagccgagatggcatcactgcactcccgcctggtgacagagagagactccgtcccccccctaaaaaaaaaaaaaattagcagggcgtggtggcgcatgcctgtaattccagctactcggggaggctgaggcaggagaatcgcttgaacccaggaggcggaggctgcggtgagccgagatcacaccattgcactccagcctgggcaacaagagcgaaactccatctttaaaaaaaaaaaaagaggatggggctgggctccctttgtgccgtgggatggtagaaatcagccaatgcctcctgctccaggaggccctcgctgctctcttctcctcccctcagaccagattgggggctaaagcctctctgaactctcagctgggcaaagaaaggtttttaagtgcgtggatagatgattcagtaaacaaatacgtgaattttcaatctggcaaatgcctatgcatatgtcaaacccactccatttattatttatttatttttaatttaattaatttttttttttttgagatggagtctcgctctgtcacccaggctggagtgcaatggcacgatctcagctcactgcaacctccgcctcctgggttgaagtgattctcctgcctcagcctcccaagtagctgggattagaggcacccgccattattcccagctaatttttgtatttttatagagatggggtttcaccatgttggccaggctggccttgaactgtgacctcaggtgatccatccgccttggcctcccaaagtgctgggattacaggcatgagccactgcgcctggccaacaaaacccactccaaatgtcccctataaggtccagaagcgctgtctggggcccttgggagggtgaagtcagcgtgacatctccacgtggctaacttgccctgtccccacccagctttaaccctgacccgaggagccgctatacattctggacttttgtggtgggtggcacgttggtgtggctctccatgtatggcgtgaaccaggcgcaggtgcagcgctacgtggcttgccgcacagagaagcaggccaagctgtgagtgtttcggggagcaaggtcggggtttctgggacatgctgcccccctccaccagcctgaggctatcccctaagcctgaggctgcctcttcccccagggccctgctcatcaaccaggtcggcctgttcctgatcgtgtccagcgctgcctgctgtggcatcgtcatgtttgtgttctacactgactgcgaccctctcctcctggggcgcatctctgccccagaccaggtgagtcccacccaggctcctggttggctctgcactccctcactagcttggtgggattgaggtcgaagagcattcctagcagagggaatggcctgtgcaaaggccaagaagtaggaaagagctgagaggaggccaggtgcggcggctcatgcctgtatcccagcactttgggaggctgaggcgggtggatcacctgaggtcaggagtttgagaccagtctggctaacatggtgaaaccctgtctctactaaaaatataaaaattagctggacgtggtggcacgcacctgtagtcccggctactcaggaggctgaggcaggagaatctcttgaacccgggaggcggaggttgcgatgaagggagatcgcaccactacactccaccttggatgacagagtgagactctgtctcaaaaaaataaaataaaataaaataaagagttcagaggaggatctgcaaggaatgggaaaggtgagtctgggaggcaatggaccgccctcagtaggtgtgagcagacaagggccacattcagatctagagttccagagagttccaaagatcccctgggagatgctcaggaggagatgaaaccatgacccaggccgggcatgttggctcacgcctgtaatcccagcacttttggaggccgagacaggcagatcacttgaggttagaagttcgaaaccaacctggccaacatggtgaaacccccctccactaaaaatacaaaaattacctaggcctggtgatgcatgcctgtaatcccagctactcgggaggctgaggcaggagaatagcttgaacccgggaggtggaggttgcagtgagcagagatcgcgccattgcactccagcctgggtgacagagagagactccatctcaaaaaaaaaaaaaacaaaaaaaaaaaaccaaaacaaggctgggcgcggtggcttacgcctataatctcagcacttttggaggctgaggcaggggtatcacctgaggtcatgagttgaagaccatcctgaccaacatggaaaaaccccgtccctactgaaaaatacaaaattagccgggtgtggtggtgcatgcctgtaatcccagctactcgggaggctgaggcaggagaatagcttaaacctgggaggcggaggttgcggtgagctgagatggcgccattgcactccagcctgggcaacaagagagaaactccgtctcaaacaaaaataaaaacaaaacaaaacaaacccacaaaaacaaaaacaaaaactgtaatccagcgggaactaatcatgttggtgataataataatgacagctctggtctcccatgtcccaagcgtccactctgtgcctcatgctgttcccttcaccagcagttagttctccatctaatctttcttctgagaaaggcagggcagtcacggctccaactttacagatgaggaaattgaggctcggggggaagtcactgcctgaggtcaatgggcaagtcggggggcggtgccaggacccatgcctaggtcacaccccaagtagagttctgaccatggggttcagagttagcagagggtacgggggaccaccccatctgcagtcctccctggaggtcagatccgggactgctggactgtgtaacttcagggagggactgtactctctgcctcacagtcttcatcaataaaatgaggatgacacgggtccctgcttcacagggatcccagggctcagaacacagtggggctcagggacaattctcaggttcatgcagttgatcaacaaatgcacattatagcctgaggaacatagggagaccccatctttacacaatttttttttttttgagccagagtctcactctgttgcccaggctggagtgcagtggcgcaacctcagctcactgcaacctctggctcccaggatcaagccattctcttgcctcagcccccgagtagctgggatgacaggcatgcgccaccatgcccagctaatttttttgtattttttgtaggggtggggttttgccatgttggccaggctggtctcaaactcctgacctcaggtgatccacctgcctcagcctctgaatgtgctgggattacaggcatgagccactgtgcccggcctttctttcttttctttctttttttttttttttgagacagagtttggctctgttgtgcaggctggagtgcaacggcgcgatctccgctcgctgcaacctctacctctcagattcaggcaattcctctgcctcagcctcccaagtagctgggactccaggtgccaaccaccacacccagctaatttatgtattttgggtagagatgaggtttcaccatgttggccaggctggtcttgaacttctgagctcaagtgatccacccgcctcggcctcccgaagtgttgggattacacgcgtgagtcaccctgcccggccagacccctatctttacacaaaaatttaaaaaaattagccaggcatggtggcgcacacctgtggtctcagctactgggggactgaagcaggaagatcgcttgagcccaggagttctaggctgcagtgagccacattcatgggactgcactcccgcctgggcaacagagcaagatcttttctcaaaacaaaacaaaacaaaacaaaaccacagacaaaaactaaatgcatattaaatgccgactctgagccctgtccgtcttgggtgctggggacgtgcagcatcaggacagatagatgccccggtcctcggggtgcagctgtctgggaggctgacccccagttctccccagtacatgcctctgctggtgctggacatcttcgaagatctgcctggagtccccgggcttttcctggcctgtgcttacagtggcaccctcaggtgagcacccctgcttgttcatggagcattatttcagcccctgggagcctccttatcctggcctgccatccctctggggcatggaatgttctggacctgtccatcagtcccagttcctgcttgatccctagaagacagctcaggtaggcgctggcagagagcatgccctgggcacagggaccccaactgcaagggtttaccttcttatcacctgtcagggccacgcctgactctcctctcttcttcttccttctttccttccttcctccccagacaaatatttgttgaacatctactatgtggcaggtactgtttttttttgttttttttccggatggagtcttgctctgtcacccaggctggagtgcagtggtgccatctcggctcactgcaacctccacctcctgggttcaagcaattctcctgcctcagcctcccaagtagctgggattacaggtccacgccaccacagccggctaatttttgtatttttagtagagacggggtttcgccatgttggccaggctggtcttgaactcctgacctcaggtgatctgcatgctttggcctcgcaaagtgctgagattgcaggcatgagccaacgtgctcagcccaggtactgttgttctaaaccctggggcacagccatgaccaagcagtcccctgcttctgccttccaaggccacacactcaggtggtttccactcttccgggacttctggtcacatgccctcactgtcccttttgcaaatctcccacatgtgactgcagtccctctggaaccagaacccacctgtctgtcccacctgcccttggtcacaggtgtccttgctcctgtagggatgtctcaggtcttcggggaggggaggggcaaatatctccttcacctttgcaggactgggttacccccaccgttgccctcaggctgggtgaggtctggcaggccagatggtgtggacggtctctccatatggcctgaggaccccccgctgccttcctcacacagcacagcatccaccagcatcaatgctatggctgcagtcactgtagaagacctcatcaaacctcggctgcggagcctggcacccaggaaactcgtgattatctccaaggggctctgtgagtttcagggagacctgggtgggaggccagggcagtccctccccgttgaccgtgccatcctcatccactacagcactcatctacggatcggcctgtctcaccgtggcagccctgtcctcactgctcggaggaggtgtccttcaggtgagaccccacctgccccctgccctggtctcctgagaggtgggggcacctttccctctttcccattaaactgaggctcagagaggtcacatgtgtcagtggcagaactcacttctatgttttttttttttttgagatggggtctcactgtgttgtcccaggttggtgagcagaggcccgatcatagctcactgcaacctccagctcctgggttcaagccatccttccacctcaatctcccaagtagctggagttacaggtgtgtgccaccatgcctggctaatttttttcttttttcttttttttttttttttgaggtggagtgtcactctgttgcccaggctggagtgcagtggcatgatctcagctcgctgcaacctccaccccctgggttcaaggaattctgcctcagcctccagagtagctgggattacaggtgcatgccaccatgcccgtctaatatttttgtatttttttttcttgagacggagtctcgctctgttgcccaggctggagtgcagtggcaccatcttggctcactgcaagctcagcctcctgggttcacgccattctcctgcctcagcctcccgagtagctgggactacaagcgcccgccaccacgcctgactaattttttgtatttttagtagagatggggtttcaccgtgttagccaggatggtctcgatctcctgacctcgtgatccgccctcctcggcctcccaaagtgctgggattacaggcgtgagccaccgcgcccagcttatatttttgtatttttattagagatgggacttcaccatgttggccagtctggtctcgaactcctgacctcaagtgatccacccgcctctgcctcccaaagtgttgggattacaggtgtgagccaccacgcctggcctggctaattttaaaacttgtttttagagacagggtctcgcttcgtgcctaggcttgtcttgaactcctggcctcaagcaaccacccgcctcagccttccaagtcgctgagattaagaactaagttctatttgatgccagaggccatcaggggacttttttgcagctggctggcttggggtgggggaattgggaagggggaggtggcgacagaaagggcctccctatggaggttgcagtgagccaagatcgcgccactgcactccaacctggacagcaaagtgagactctgtctaaaaaaaaaaaagaagaagaaagggtctccctggcttgagggtgggactgccacccccaagagataatcagtgtctttgcctccaacccaagggagataggcaggaacaaggggggggggtcctctcccctttagggaaactgagacacagaggagtccttgagacccacattggagttcctgaggtctcgctttcccagcgggtaaactgaggcccagagcggtgggagggctccgccctcagccccacttccacctactctcccagggctccttcaccgtcatgggagtcatcagcggccccctgctgggagccttcatcttgggaatgttcctgccggcctgcaacacaccggtgagtgggggcggggcaaggggcggggaggggcggggccggacaggcccctccccttccctgacgccggctctgcccccagggcgtcctcgcgggactaggcgcgggcttggcgctgtcgctgtgggtggccttgggcgccacgctgtacccacccagcgagcagaccatgagggtcctgccatcgtcggctgcccgctgcgtggctctctcagtcaacgcctctggcctcctggacccggctctcctccctgctaacgactccagcagggcccccaggtgagcagacttgagggtaggggggtacccgagccctggatggtgtgatcttgaagggaaacttacttgccctgcactctgtgtaagaagcctgattagtaaaatgcattcctgggggagggaacggtaggtgcaaaggccctgaggccacaatcgggttagtcccagtccaactgcactgaggttagggtgcatttaatgggaggagagatgggtgggagatatggtgcagccagaggaagctagtactttttttgttttgtttttctgagacagagcctcgctctgtggtccaggctggaatgcaggggtgcaatctcagcttactgcagcttcaacctctcaggctcaagcaatcctcccagcttgagggaggcccagaatttggtttggttctattttttattgagataaattagccatttaaaagtggcatttaggccaggcaggcacagtggctcacacctgtaatcccagcactttgggaggctgaggcaggtggatcacctgaggtcaggagttcaagaccagcttgatcaacatggggaaacccccgtctctactaaaaatacaaaacttagccaagcgtggtggcaggtgcctgtaatcccagctactcgggaggctgagacaggagaatcgcttgaacccaggaggtggaggttgcagtgagctgagatcgcaccactgtattccagcctgggcaacaaaaatgaaactccaactcaaataaataaattaaagtggcatttagtatatttgtgcaaccatcaccactatctaagtcaagaacgtttcctcttttttttttctaattttgtatttttagtacagatggggtttcaccatgttggccaggctgatcttgaactcctgacctcaggtgatccgcccacctcagcctcccaaaatgctgggattacaggtgtgagccactgtgcctggccccaaaaacattttctatttttttttttttttggagcagggtcttgctctgttgcccaggctggagtccagtggcacgatcatagctcactgctgcctcaacctcctgggctcaaggaatcttcctacctcagcccccctagttgctgggaccacaggtgcacaccatcatgtcctgcttgtttttatttttattttttgtagagacagggtctggctatgttgcccaggctggtctggaattcctgggctcaagcgatctgcccacctcagccttgcaaagtgccaggatgacaggtgtgggcacccagccaaccaagaacattttctgttttgtttatttatttatttatttattttggttttttgggtgggtttttttgctttttgtttatttgattttttggagacagggtctcactctaacacccaggctggagtgcaatggcacaatcacagctcactgcaccattgacctccagactccgatgatcctcctgcctcagcctcccaagtagctgggactataggcatgtatcaccatgctgggctaaattttttgtattttttatagagacgagtttttgccatgttgcccaggctggtctcaaagtattgggctcaagtgatctgcctgcctctgactcccaaagtgctgggattacaggtgtgaggcactgttcctggtcataagaacatttttatcaccccagaaagaagccctgtccccatcagcagtcacttcccacttccccctctccccagctcctggcaagcacgaatccactttctgtttctatgaatttgcctgttctgggcatttcatgtaaatggaatcataaaatatgtgatcttttgtgtcttagcataatacatatatattttttgagacggggtttcactttgtcgcccaggctggagtgcagtggcgtgatcccagctcactgcaacctctgcctcccaggttcaagcaattctcctgtctcggcctcctgagtagctggggtcacaggcatatgccaccacgcttgggtaatttttgtatttttagtaaagatggggtttcaccatattgatcaggctggtcttgaactcctgacctcaggagatccacacatcttggcctttcaaagtactgggattacagcagagtacagtggagccactgcactccagtctgggtaacagagtgagactccaccaaaaacaaacaaaaccaaaaacatttgtgaacaagttttggtatggacatatgttttaatttctctaggtatatacctatgagtggaattgctggatcatatggtaattctttaactttttttttttttttttagatggagtcttgctctgtcgcccaggctggagtgcagtggtgtgatctccactcactgcaacctccgcctcctgggttcaagcgattctcccgcttcagcctcccgagtagctgggactacaggcatatgccaccacgcctggctaatttttatatttttagtagagaaggggtttcaccatgttggtcagggtggtctcaaacccctgacctcagatgatccgcctgccttggcctcccagggtgttaggattacaggcctgagccaccacgcccggcctatgtttaactttttgaggaactaccagactgttttccacagcggccacatcattttacattccgaccagcaacatatgaggattctaacttctccacgtcctcgccaatactcattattctccatcctagtgggtgtgaagtgatacctcactgtggttttgatttgcatttccctgatgaataatgatgttgagcatctttcttttcattggccatttgtgcatcttctttggagaaatgtctattcaaaccctttgcccatccagcctgggtaacatagaaagaccctatctctataaaaataaaaatgaaaaaattagctgggcatggtggtgcacacttgtagtcccagctccttgggaggctgaggcaaagaggatcgcttgagcctggggggccaaggctgcagtgaagcatgatcccaccactgcactccatcctaggcaacagagcaagaccctgcctcaaattaaaaaacaaacaaacaaaaaaacaccctttgcccatttttaaattgggtgatttgtctttttattgttgagttataatttacatatttttatatctttatgtattctgggtacaagcccctgatcagatgtataatttgcatgtgatattttctcccattctgtaggttgtcttcattctctcgatagaatcctttgatgcacagaagtttttaattcttttttttggtgggcggatggagtctaactctgtcacccaggctggagtgcagtggtgcgatttcagctcactgcaacctccacctcccaggttcaagggattctcccacctcagcctcgtgagtagctgtgactacaggtgcacaccactatgccaggctaatttttatatttttagtagagatggggtttcaccatgttagccagcctggtttcaactcctgacctcagcctgcctcagcctcccaaagtgctaggattacaggcatgagccaacatgcctggccagaagtttttaattttttttttttttttttgagatggagtctcgctctgttgcccaggctggagtgcaatggtgtgatctcggctcactgcaagctccacctcccgggttcatgccattctcctgcctcagcctctcgagtagctgggactactggcacccgccatcaggcctggctaattttttattatttttttatttttagtagagacagggtttcaccatgttagccaggatggtctcgatctcctgacctcgtgatccacccgccttggcctcccaaagtgctaggattacaggtgtgagccaccacgcccagccagtttttaatttttgatgaagtccaattgatttatttttttctttggtggcttttgcttttggcgtcatatctaagaaacaattgcagtcacgaagattcccacctatgttttcttctgagagtttaatttggtttgattttgagggtgacagggagccacagagggtgacgggcagcagcaggtgatctgagttacattttagtaatgtgccctttggctgtgtgtggaggacgtctagggtggggatgggatacctggagggaaggaacattggctactgcacagatctgggcagacagtaatggaggtctgtgctaggccatggcagttgggggaaggaagcagggggtgaggttggaacagcttttgagtgcaggcaggggataaaagaggaggttcaagtctgtctctcccaacctgcagctcaggaatggacgccagccgacccgccttagctgacagcttctatgccatctcctatctctattacggtgccctgggcacgctgaccactgtgctgtgcggagccctcatcagctgcctgacaggtaggtaaacagagcatgtggcctcagaggtcatcccattcatctctctgcctcaaggctccacccagcagggaggggagaaaggacgctcccattggccaaactgccactgtgtgctgtacacatttgtaccttattattattattattattattattattatcatcatcatcatcatcatcatcatcatttttgagatagagtctcactctgtcacccaggctggagtgcagtggtgtgatctcagttcattgcaacctccacctcccagattcaagcgattctcatgtcacagcctcccgagtagctgggattacaagtgtgtgccgccatgcttggctaattttgcatttttagtagagacggagtttcgccatgtgtctcgaactcctgggctcaagtgatccgcccacctcggcctcgcaaagttctgggattataggtgtgagccactgcacctgggctgtacctatttttttaaaaggaaaaaaaaagtttgtgaggaaaaaagaagtgtgtgtgtatatatacacatacatacacacttttatgtgtatatatacataaaagaaattatgaatatatataaaaattatgactatatatatacataaaagaaagtgtatatatatatagtttcttttaaagggacggggtcgactgggcgtagtggctcatgcctgttatcccagcactttgggaggccgaggcgggtggatcacctgaggtcaggagttcaagaccagcccggccaacatggtgaaaccccgtctctactaaaaatacaaaaaaattagctgggcatggtggcaggcgcctgtaatgccagctacttgggaggctgaggtaagggaatcgcttgatcctgggagatggaggttgcagtgagccaagattgcgtcactgcactccagcctgggcaagagagtgagactccatctaaaagaaagaaagaaagaaggaaggaaggaaggaaggaaggaaggaaagagaaagagagagagagagaaggagagaaagagagagagaaagaaaagagacaggtctcactgttacccagactggagtgcagtggcacaatcatggctcactgcaaccttgaactcctgagctgaaagcaatcctcccacctcatcctcccgagtagctgagactacaggtgcgcgccaacgtgcccggctcacatttacaccctttaaagctatgttgctttcttgacaaccctgcacctctcagagcttgccctattttgcagaggcagaaacggaggcattgcctgcaactcctctccccaacaagattaagtcctcagtagaggatatgggttggggcgggcggcgctatccctggtgctgaaatatcttctaaagctgccggtgactccgcacttgttagggaattctaaattccacggaaaagtagaaggagacaaagaggggaaagtcagtagtgataacagtacctgctcacacttcttgagtctcagacttcacagtcatcaggcctttatcgagtcctcctctgtgctggacgctattttaggcactggggatgcagcagtgaatggaaccgtgtgctggaccctcccagccatccattaatgtctttgttttgttttgttttgtttttttgagatggagtttcactctggtcgcccaggctggagtgcaatggtgcgatgttggctcactgcaacctctgactcccgggttcaagcaattctcttacctcagcctcccgagtagctgggattacaagcgcccacccccacgcctggctaatttttgtatttttagtagaaatggggtttcgccatgttggccagactagtctcgaactcctgacgtcaagtgatcccctgccttggtcttccaaagtgctgggactacaggcgtgagccaccgtgcccaacctccaatgatgtttttgttttgttttgttttgttttgttttagaaacagggtctcactctgtcaccaagctggagtgcagtggcacaatgacggctcactgcagcctcgacctcttgggctcaagcaatcctcctgcctcagcctcccaagtagctgagactagaggcacacaccaccatgcctggctaattttttaatattttgtagagatgggttcttgctatgttgcctaggctggtctccaactactgggcaactctaagcaatcctattgccttagactcccaaagtgcaattatgagccaccatacctggcctcactgatgttttattacaacttcactgtgtagatgaggaaactgaggctcagaggcttgccagggtcccttagtgggactggagcctgttagacttcatagaccagggatctcctttctccttcccaggacctggtctccaacccccatgaccccttcactgaatgcctggatttctccatttctccccgcctctcaggccccaccaagcgcagcaccctggccccgggattgttgtggtgggacctcgcacggcagacagcatcagtggcccccaaggaagaagtggccatcctggatgacaacttggtcaaggtcagtcttaggctgggttcccagatctagaggcagccaagtgactttaggacgtgaccacagctcaggggagggacatggtatatcagcacctttctccatcgctcattatctccagtcaaaagactctattgggagctgattcatcctcaacagtttttatctcccttcacaaggactgaacagagtttaatactattcctttttgtttgtttgttttttgagacagagtctcgctctgttgcccaggctggagtgcagtggtgcaatctcggctcactgcaacctccacatcccgagttcaagcgattctcctgcctcagcctcctgagtagttgctactacaggcgcatgccaccgcacccagctaatttttatgtttttagtagagatggggtttcaccatgttgcccaggctggtctcgaactcctgacctcaaatgatccacccaccttagacccccaaagtgctgggatgacaggcatgagccaccgagcccagcctcatcttcaagtttttgttatctcccttcataaggactgaacaaagttgaatactattcctttttgtcgttatctgtttttacagtgacttccaatctttggcaggtgaaactggtgtgctgttagggtattgatgtaaagtctcttcttaaaataaaattacttaattcaaaagtgagtcaacttggggaaaaaatcttacataagaaacacaacagatggtaaaccgattttggctaaaaccgcgtggttgctttgtgaattcccagagtttggaaaatgctgtccctgggggacctgatcccatgcctacccctgttttggaatccctgttccattctctcatttattgagcacctgctgtgtacccagtcctgctctgggctatggtctaagacccccaccccaccctcatctagcaggggcaggtgaaaactaaaaagagaaacatgtagggtctgtctcagtatgtgataagcattcaaaagataatacaaccagatgctgtcaggccgggcacggtagctcacgcctgtaatcccagcactttgggaggttgaggtggatcgcttgaggccaggagttcaagaccagcctgtcgaacatggcaaaaccctgtctctactaaaaatacaaaaattagccgggcatggtggcgtgtgcctgtaatcccagctactcagtggaatgaggcagaagaattgaacaattgaacccgggaggtagaggttgtagtgagctgagatcgcgccactgcattccagcctgggtgacagagcaagacttcgtcaaaaagataggaaagcaggaagggagggagggagggaaaagaaggaaggaaaggaaagagccaggcgtgatggctcacccctgtaatcccagcactttgggagacttaggcaggtgcatcacctgaggtcaggagttcgagaccaccctggccaacatggtgaaaccccatctctactaaaaatacaaaaaattagccgggtgtggtggtgcatgcctataattccagctattcggaaggctgaggcaggagaatcgattgaactcaggaggtggaggttgcagagagcagagattgtgccattgcactccagcctgggcaacaacagccagacactgtcagaaagaaagaaaagacagagagagagagagagagagagagagagagagagagagagagagagcaagctaaaaagaaaaacgtgtagggtctcagcatgataaatattcaaaggataataaaaccggatgctgtgatggggagcaactttagccagggaagtcaggggtggcctcttgggagaggtgacattgattgaccctgagttaggagaagaggaaccagccacagacaggaacagctttgactgagaaggggattgggaggggaggggtttgcctgaaggtgtttaaagctccctccagctgccctagagaagtgtttatcttttctttctttcctcttttcttttcctttctcttcttttcttttttttctttctctctctttttttgttctttattattttatttttcttttttgttgtctttgttttatttgtgtgttttttttcttttttgtcttttttttttttcctttttttgagatagggactcactctattgcccaggctggagtgtagtggcatgaccatggctcactgcagccccaacctccatggtccgagaaattctcccatctttcaacctcctgagtagctgggattataggcatgcaccaccgagtctggttaatttttttatttttggtagagatggggttttgccatattggccaggctggtcttaaactcctgggctcaagtgatctgcccaccttggcctcccaaagtgctaggattacaggggtgagccaccgtgcccggccagaaatatttattttcttgaaggtgaacaggcagagaagcagagaaaggagggaggaactatagcaggcatctgagaaagcgttgatggcctgggctgtaggtgacatgtgagtggggaagagaagcgcatggaaattttggaggcagagcgggcaggactggcccgtgcactgagcaaggggatagtatgcaattctgtgcacgccccgtcccgccaggtcatcagtagcccatctgggagatgagctgacacggaacagggtggggacagggtctctgatggggtctctttttcccacttttccccagggtcctgaagaactccccactggaaacaagaagccccctggcttcctgcccaccaatgaggatcgtctgtttttcttggggcagaaggagctggagggggctggctcttggaccccctgtgttggacatgatggtggtcgagaccagcaggagacaaacctctgaggacagggccagccgcgggactgacaccctgggatggaacctcaggatgggccaaacccagacaacgggcccatggccttgggctctgattggctggattgccttgtatgcaaatgagttcaggactacaataccctaccctatggggaggccctgcctccgggaggtcattttttaaatccagccccttgcttcaaccgtccccagtattagacgctgcagccctgacggctccccccaaataaggctgggtttttctctctctcttttttttttttttttttttttgagacagggtcatgctctgtcacccaggctggagtgcagtggtgtgatctcggctcactgcaacctctgcctcccaggctcaagtgattctcctgcctcagcctcttgagtagctgggattgtaggtgcccaccaccatgcccagccaactttttgtatttttagtagagacagggtttcaccatgttggtcaggctggtctcgaactcctgacctcaagtgatccacctgcctcggcctcccaaagtgctgggttacaggcgtaagctaccatgcccagcctaccgtttttctcaatctataatagaaagccaccacgcccaggtaatttttgtaattttgtatttttgtagagacggggttttgccatgttggccaggctggtctcaaactcctgatctcaggtgatcctcctgccttggcctcccaaagggctgggattacaggggtgagccaccgcgccccacctctttcttattttcttcctgggattggggaggggatgattcagaccccacatggcctccaaccttggcccacacacctgccatggctcccatcatcctgagcatgctagcgtcccctcctcacctgacaatggaggctctcgaattgggttgtgtccccccaaaatttatgtctacccagaacctcagaacatgagcttacttggaaatagggtctttgcaggtgtaactggttaaattaaaagaggtattactggaggaggatggatgaatccagtgactggttcctcatatgaagtagagaagagatgcagagaaacacatggggaagatgccacgtgaagacagaggcagtggttggatcaatgcatctacgagtcggagaacccaaggattgccagcaacaaccagaaatcaggaggggggcatgagatgcattatttcttagagcctttagagggaacatggccctactgacaccttgatgtcagacttctggctgctagaactgtcagagaataaatttctgttgtttgatgccaccaggcctatagtggtttgtgacagcagccacaggagctcatacacctttttttttttttttttttttttttttttttttaaggcagagtctcgctctgtcgcccagactggagtgcagtggtgcgatcttggctcactgaaacctctgcctcccagattctccttcctcagcctctggaggagctgggattacaggcatgtgccaccattcccggctgacttttgtatttttagtagagacggggtttcaccatgtcggtcaggctgatctcgaactcctgacctcaagtgatctgcctgcctcagcttcccaaagtgctgggattataggcgtgagccactgcgcccggcctcatacacaccttctgatcccgcttctctccaccccttggagacctggtcctctgtgcccgctgttgggattggacacctttagatttggacttaaaactggccattacaactttaaaatcgatgactggacgggtgtggcgtctcatgcctgtaatcccagcacttcgggaggctgaggcgggcagatcactcgaggtcaagagttcaagaccagactggccaacatggtgaaaccccatctctactaaaaatacaaaaattagccgggtgtggtggcgggcgcctgtagtcccaggtactcgggaggctgaggcaggagaatcgcttgaacctgggaggcagaggttgcagtgagatcacgccactgcattccagcctgagtgacagagcaagactatgtctcaaaaaaatatatatatatgtatatgtgtgtgtgtgtgtgtgtgtgtgtgtatatatatatataaaatcaaatcaatgactgagcaacgtggtaagcagattttccacctctgtgtagtcctcactcaaaacagagcccaaatctgagatgggaggaggtgcccggggtagggatgggctaatgttcccccaagtgagcagaagaagcttatctggctgcagtatagagatccttccacggcgttattcattccgtttactgcggagtagtattccattgtgcaaaaggaccatagtttgttatctatacaccagttgatgtatgggttgtttgccacttttggctatgagaaataaagttgctatgaacattcatgtacgagtctttgtatggaggctgggcacagtgtctcacgcctgtaattccaacactttgggagaccaaggcaggaggattgctcaagaccaggagtttgagaacagcctgggcaatataacgagaccccatctctatagaaaaatttctttttttttttttttttttttgttttttttgagacggagtcccactctgtcccccaggctggagtgcagcggtgcgatctcggctcactgcaagctccgcctcccgggttcacgccattctcctgcctcagcctcccgagtagctgggactacaggcgccggttgccaccaagcccggctaattttttttgcatttttagtagagacgggatttcaccatgttagccaggatggtcttgatctcctgacctcgtgatccgcgtgcctcagcctcccaaagtgccgggattacaggcgtgagccaccgcgcctggccagtcatctctacttttgtaagcagacagggagggcctccaggtctacaggaatttttttttttttttttttttttttttgagatggagtcttgctctgttgcccaggctggagtgcaatggcgtgatctaggctcactgcaacctctgcctcctgggttcaagtgattctcctgcctcagcctcctgagtagctgggactacaggcatgtgcccactgcgcccagctaattttgtatttttagtagagacaaggtttcaccatgttggccaggctggtctccaactcctgacctccagtcatctgcccaccttggcctcccaaagtgctgggattacagtgagccactgcgtctggccagggattcaggaattctttttttaatggttttttctttctttctttcttttttgaggcggagtcttgctctgtcacccaggctggagtgcagtggcatgatctcagctcactgcagcctccgcctcccagactcaagtgattttcctgcctcagcctccctagtagctgggattacaggcatgcaccaccacagccagctagtttttgtatttttagtagagacagggttttgccgtgttggctaggctggtctcgaactgctgacctcaattgatccaccagcctcggcctcccaaagtgctgggattacaggcgtgagccactgcactcagcctggactacagaaatttaaccagcttgagcatatgagcctgttttacagccccctgccccatagcttgtttttttgtagaaaaaaaaacaagtagaaccccatgtagaatgtggtcacctggttggctggaaccagtttatgacagacctcagcaacttatagatggactggtgaactctaatttttaccgtgctaaagtttccaccctaggccaggagcggtggctcacacctgaaatcccagcgctttgggaggcagaggagggaggatcacctgaggtcaggagctcaagaccaacatggccaatatggggaaaccccatctgtactaaagatacaaaaattagccgggtgtggtgacacatgtctataattccagctactcgggaggctgaggcaggagaatcacttgaacccgggagccagaggttgcagtgagccaagatcgcgccactgcactccagcctgggcaacagagtgagactctgtctcaatcaatcaatcaatcaatcaatcaataaagtttccacgctgggaggaactacagctcaatgccttcacaatgcgacctacgtgctggcgtgacggctcattgtatctgcgccactgcgacactttctatgcgtgcaataatgtaccctctcccctctccattgccccagaaaaccctcctgtcactttccctcttggggacactgctttggaaaaaaagcaaagcccactcctgattctttgcttacttgggacaagtaataaaacccctattgatcaaaacctgcgttcttttggagagttgtttgttactaggcaaatgaaccccctttttcttgggtaacattttcatttttcttggggtatctagaagtaaaatggctggatctgacagtagatatatgtttgactttttaagaaactgcaagccgggcacagtgacccatgcttataatcccagcacttagggaggctgaggcgggaggatcgcttgagcctaggagttcgaggccggcctgggcaacatggagaaaccctgtctctagaaaaaaaaaaaaatagctgggcatggtggcatgcacctgtagtcccagctacttggaaggctgaggtggggggatccctcgagccccagagatcaaggctgcagtgagccatgactgtacccctgcactccaacctgggcgacagagcaagaccctgtctcaaaaaaaaaaaaaaaaaaaggctggagtgcagtggtgcaatcacagctcactgcagcctccacctcctgggttcaagcgattctcatacctcagcctcccgagtagctgggattacaggcgctcactaccatgcctggctaatttttgtatttttagtagagatagggtttcgccatgttgatcaggctggtctggaactcctgacctcaagtgatctgcctgcctcagcctcccaaagtgctgggattacagtcatgagccactgcacctggctgcaaaaaaaggggaaatttagtttcattttgggttaattttcgtatatgaggtaagggtctgatatggtttaactctgtgttcccacccaaatctcatcttgaattgtactcccataattcccacgtgttgtgggagggagctggtgggagataattgaatcatgggggcggttccccccatactgttcttgcggtagttgtggtagtgaataagtttcacgagatctgatgttttttgtttgtttgtttgttttgctttgtttttttttttgagacagagtcttgctcttttgcccaggctggaatgcagtgacatgatctcagctcactgcaacttccacctctcgggttcaagcaattctcctgcctcagcctcccaagtagctgggactacaggtgcctgccaccaagcccgtctaattttttgtattttagtagagagtagagggtttcactgtgttgcccaggctggtctcgaactcctgagctcaggcaatctgcctgcctcagcctcccaaagtgctaggattacaggcatgagccaccgtgtctggccgagatctgatggttttatcaggggtttccacttttgcatcttcctcattttctcttgccactgccatgtaagaagtgcttttcacctcctgccatgattctgaggcctccccagccgtgtagaactgcaagtccaattaaacctctttttctctgtctcgggtatgtctttattagcagtgtgaaaacagactaatacagtaaattggtactgggagtggggcattgctgaaaagatacctgaaaatgtggaagtgactttggaactgggtaacaggcagaggttggaacagtttggaaggctcagaaaaagacacgaaaatgtgggaaagtttggaacttcctagagacttgttgaatagctttgcccaaaatgctgatagtgatatggacaataaggtccaggctgaggtggtctcagatggagatgaggaacatgttgggaactggagcaaaggtgactgttgttatgttttaacaaagagactggcagcattttgcccctgacctagagatatgtggaatgttgaactttgagagagatgatttagggtatctggtggaagaagtttctaagcagcaaagcattcaagaggtgacttatgtgctgttaaaagcattcagttttaaaagggaaacagagcataaaagtttgaaaaatttgcagcctgacaatgtgatagaaaaaaaattgcattttctaaggagaaattcaagccaactgcagaaatttgcataagtaatgaggaatcgaatgttaatccccaagacaatggggaaaatgtctccagggcatgtcaggggtcctcacagcagcccctcccatcacagggctggaggcctaggaggaaaaagtggttttgtgggctgggcccagggtccccaagctatgtacagtctagggacttggtgtcctgtgtcccagccgctccagccatggctgaaaaaggcgaatgcagagctcaggccatggcttcagatggtgcaagccccaagccttggcagctcccacatggcattgagcctgtgggtgcacagaagtcaagaatcaaggtttgggaacctccacctagatttcagaagatgtatggagatgcctggatgcccaggcagaagtttgctgtaagggtggggctctcatggaaaacctctcctagggcagtgcagaagggaaatatggggtcagagcccctacatagagtctctactggggtactgcctagtggagctgtgagaagagggccaccatcctccagacaccagaatggtagatccaccgacagcttgcacaatatgcctggaaaagccacagacactcaacaccagcccgtgaaagcagctgggaggaacgccgtaccctgcaaagtcacagggacggagctgcccaagatcatgggaacccacctcttgcatcagcatgacctggatgtgagacatgaagtcaaaggagataatgttggagctttaggatttgaatgccccgccggatttcagacttgcatggggtctgtagccctttgttttggccaatttctcccattttgaatggctgtatttacccaatgtctgtacttccatttccatctaggaaataactaacttgcttttgattttacaggcttataggcagaaagaacttgcttgtctcagatgagactttggactgtggacttttgagttaatgctgaattgagttaagacattgggggactgttgggaagacatgattggttttgaaatgtgaggatatgagatttggcaggagccaggggcagaatgatgtagtttggccctgtgtcccctcccaaatctcatcttgaattgtactcccataattctcatgtgttgtgggagggacctagtgggagataatcgaatcgtgggggcggtttcccccatactgttctcgtggtagtgagtaagtctcacgagatctgatagttttatcaagggtttctgcttttgtgtttccctcattttctctggccactgccatgtaagaagtgccttttgcctcctgccatgattctgaggcctccccagccatgtggacctgcaagtccaattaaacctctttttctcagtctcaggtatgtctttattagtagcgtgaaaatggactaatacagggtccaacgtcatcattttgctgtggatatccagttttccgcagaatttgttgaaaaacacttgtcctttcccatttaatggtcttggcatccttgtcaaaaatcatctcactgtatattaagggtttatttctgggctctccatgtcttttactgatctatatgtctgtctatgtaattttgacctcaaggttccttgagatgaatttaagaatggatttttctctttctgaaaaaaaattgagattttgataggattgctttgaatcaacggatcactttgggtactatagccatcttaacaatattaagtcttctaattcatgaacatgggatgtctttctggtatttttgtctttaatttatttcagcgatgatttgcagttttcagtgtacaagtcttttggccccttggctaagtttttcttaagttttttattcttttggacactaccataagtggaatttttttcttacagtgagctgtgatcttgcagtgagcctcagttgtgccacttcggtttttttttcttttctaaagcaaataacaagacacagtttaccatttttactttttaaaacctaaccttggctgggtgcagtggctcatgcctgtaattctagcactctgggaggccgaggtaggtggatcacttgaggccaagaattcaagaccagcctggccgacatggtgaagctccatctctactaaacatataaaaattagctgggtacctataatctcagctacttgggaggctgaggtgggaggatcacttgaacccgggaggtggagactacagtgagccgagatcgtaccattgcactccagcctggatgatagaatgagactccatctcaaaaaaaaaaaaacatacaaaaaaaaccccacccagccttaacactacatatttttatttttacttttttaagacaaattctcactctgtctctcaggctagagtgcagtggcccgaactcactgcagccatgaacccctgggtttaagttatcctcccacctcagccttccaagtaactgggactacaagcatgcaccatcacacctggttaatttttaaaattttttgtagagatggggccccactatgttgcccaggctggtctcgaactcttgggctcaagtgatcttcctgtgtcatcctcccaaagtgctgggattataggcgagagccaccacacccgacctcatatgcctttttcacatcctggggtgaggcatgtctctgcatgcctggaacttagtggtaagcctccatgttgtaacagatggtgggaccaggtccaagaatgcaggcagccagtggtgggaagcaggggaggctgaaggcgacccgggtatcctctgggcttctgcagggttgtgctggtggtgatagtggtggaggttctttgtgctttcgtttttctcctttctccaacaacaaactggaattggtttcttttttcattgttgttgttgttgttgtagagacagggtctctgtcacagaggctgggatgcagtggtatgatcacagctcactgcagcttcaacctccagggctcaagtaatcctccagcctcagcgtcctgagtagctgtgactacagaaagcaccagcatgcctggctaatcttaaaattttttgtggagatggggtcttgctatgttgcccaggctggtcttgaactcctgggctcaagtgatcctcccatctcagactcccaaagtgttgggattacagatgtgaaccactgtgcctggcctgtttgcctaatttccttttcagattgttcgttgttagtggtgtagaaatacaattgattttttttttttttttgagatggagtctcgctctgtggcccaggctagagtgcagtggtgtgatctcggctcactgcaacttccgcctcctggtttcaagcgattctcctgcctcagcctcccgagtagctgggactacaggcgcgtgccaccattcccagctaatttttgtatttttagtagagacagggtttccccatgttggccaggatggtcttgaactcttgacctcatgatccacctgtctcagccttccaaagtgctgggattacaggcgtgagccaccgtgcccagccaataaaatcgatttttgggggttgattttgtattctgcaaatttgctcaatttgcttattttaacaggcttctgtggacatgtgtgtaacttctgggatactctatgtataagatcatgtcatctgcaaacagagatcattttattccttcttttccagtttggatgcagaaattttcaatttctgtttcatgcctagtcacattggctaaaacttcatagagagagagagagggatacggaatcttggtctgtcacccaggttggagtgccgtggtgtgatcttggctcactacaacctccacctcccacgttcaagcaatcctcctgcctcagcctccccagtagctgggattacaggcatgtgccaccacgcctggctaatttttgtattttcagtagagatggggtttcaccatgttggccaggctggtctcgaactcctgacctcaagtgattcgctcatcttggcctcccaaagtactgggattacagacatgagccaccacacccggcctgtaggatgtttagcaacatctctggcctcatccctctaggtgccagtagcaccaccatccactccagttgtgacaatcaaaattgtttccagacatggcgattgttccctaaggcctggggcagagtaggagagtggaatcatccttgcttgaggatcactattctgcactaaaaaagaatcaaaaaggatatgtagggttctcttttccataatatgtatttattattttttaattttttcgatacggagtcttgctctgttgcccaggctggagtgcagtggcacaatcttggctcactgcaacctccgccctctgggttcaagcaattctcctgccttaccgtcccaagtagctgggattacaggtgcatgccaccacgcccagctaatttttgtagtagagatgggttttcgacatgttggccaggctggtctcgaactcctgacctcgtgatccgcctgcctcggcctcccgaagtgctgggattacaggcatgagtgaccatgctcagcctatatttaaatttttatttcccccgagatggagtttcgctcttactgccccagctgaagtgcaatgatgcaatctcggctcactgcaacctccgcctcctgggttcaaagtgattctcctgcctcagcctcccgagtagccgagattacaggtgcccgccaccacacccggctaattttttgtatttttagtagagatggggtttcatcatgttgcccaggctggtctcaaattgctgacctcaggtgatccaccctccttgacctcccaaagtgctgggattgtaggcgtgagccatcgcgactggactatttttaatatttaaagtgattcatttttatagccagaaaagaacattttgaaattattggccaggtacactggctcatgcttgtaatacaaaaatacaaaaattagccagctgtggtggcttgtgcccatagtcccagctacttgggaggaccacttgagcccaggaggcggaggttgtagtgagccaagatcatgctactacactccagcctgggcagcagagcgagcacttttctcaaaaagaaagaaaaaaagaaattatttacatttattgagcacacaatatgtgccaagcagtttacccatatattaaaagtattgatatttgccgggctcagtagctcacacatgtaatcccagcacattgggaggccaaagcgggtagattacctgaggtcaggagttcgagaccagcctgaccaacatggagaaaccccgtctctactaaaaaaaaaaaaaaaaaaaaaaaaaaaatacaaaattagccgggtgtggtggcacatgcctgtagtcccagctactcgggaggctgaggcaggacaatcacttgaacccaggaggtggaggttgcggtgggccaagatcgtgccattgcactccagcctgggcaacaagagtgaaactccgtcaaagtctgttttgttttgttttgtttgagatggagtctcgctctgtcacccaggctggagtgcagtggtgcaatctcggctcactgcaagctccatctcccagattcatgccattctcctgactcagcctcccgagtagctgggactacaggcgcctgccactatgcccaactaattttttgtatttttagtagagatagagttttgccgtgttagccaggatggtctcgatctcctgacctcgtgatccaccccccttggcctcccaaagtgctgggattacaggcgtgagccaccatgcccagcaaaaaataaaataaataaagtattgatgtttattgctggatttggtggctcatgcctataatcccagggctttcaaaggctgaggcaggaggatcacttgaggccaggaatttgaaaccagcttgaaaaatatagtgagaccttcatctctaaaaataaaaaaattaatcaggcagggtggtgtgtacctatagttctagctactcaggaggcagagtcagaaggattgcttgagcccaggagttctaggctgcaaggagctatgaccatgccactgcactctagcctaggtaacagtgaaacttgtctcttaaaaaaatatgtgttggccgggcatggtggctcacgcctgtaatcccagcactttgggaggccaaggcaggtgggtcacctgaggtcaggagttccagaccagcctggccaacatggcgaaaccctgtctctactaaaaaagtacaaaaattagccgggcatggtggcgagcacctataatcccagctactcaggaggctgaggcaagagaagcttgaacccaggaggtggaggttgcagtgagccaagatggcaccattgcactccaacctgggcgacaagagtgagactctgtctcaaaaaaaaaaaaaatgtgttgatgtttattgagcagagactcagtaggatacactttttcttttctcttttttctttttgagacagagtctcaccctgtcgcctaggctggagtgcaatggtgcaatctcagctcactgcaaccttggcctcccaggttcaaatgattctcctgcctcatcctcctgagtagctgggattacaggtgcacaccaccatgcccagctaattttttttttttttttgagatggagtttcattcttgttgtccaggctggagtgcaatggcacaatctcagctcattgcaacctccacttccctggtttaagtgattctcctgcctcagcctcccaagtagctaggattacaggtgcactccaccatgcctggctaattttgtatgtttttttagtagagacagggtttctccatgttggtcagactggtctcaaactcccgacctcaggtgatctgctcacctcggcctcccaaagtgctgggattacaggcgtgagccaccacaccctgcactatttttttttttaatctttagtagagattgggtttcaccatgttggccaggctggtctcaaactcctgaccttgtgatcctcctgcctcaggctcccaaagtgctgggattatagacatgagccaccacgcccagccaagactcagtaggatacactttttttgaagtaattattttattgatgtttaaaaaattaataggctttattttttagagcaattttaggtttatagtaaaattaagcagaaatttcagagagctctcatatacgtcttctattctccttcacccccacaatttcccctattattaatatctttcattagagtggtatatttgttacaatagatgaacaaatattaatacattattattattattattatttgagacagagttttgctctgtcacccaggctggagtgcagtggcatgatctcagctcactgcaacctctgcctcctgagttcaggcaattctcctgccttagcctcccaagtagctaggattacaggtgtgtgccaccacgccctgctaattttttgtgtgtttagtagagacggggtttcaccatgttggtcagtctggtctcaaactcctgatctcaggtgatccacctgcctcggcctcccaaagtgctgggattacaggtgtgagccaccgcacccagcctaatacattattattactgaagtctaccttttacattagggttcactcttgggttgtgtattctattggttttgacaaatgcacaatgatgtgtatccaacatcacaacctatcatactgaatattttcactgccctaaaaatcccctgtatttggctgggtgcagtggctcatgcctgaaatcccagcactttgggaggctgaggcgggtgaatcaagaggtcaggagttcaagaccagcctgaccaataaggtgaaaccctgtctctactaaaaatacaaaagttagctgggagtggtggcgctcatctgtagtcccagctacttgggaggctgaggcagaaggatcgctggaacccaggaggtggaagttgcagtgagctgagaccatgctattgcattccagcctgggtgacagagcgagactctgtctcaataaataaataaatagtcccccatggttaatctatattggtcttgcttttagcgtcctcctcagttctattcattttgttaatttattcttttttattttctgtaaatggtcatatcatctggtttcaattctttttcttatcttattgcattgtccagcacctccacataagcacgaaatattagccatgatttgaggcattcctgcctcattcttaaatatgttgtacatcctgttttaccatcttttttgttttgtgtgtgtgtggaggtggggacagagtcttgctatgtcacccaggctagagtgcaatggcacaatctgagctcactgcaacctctgcctcccaggttcaagtgattctcctgcctcagcctcctgagtagctgggattacaggcacatgccaccacgcctgactaatttttgtgtttttagtagaggcagggtttcaccatgttggccaggctggtctcgaactcctgacctcaggtgatctgcctgcctctgcctcccaaagggctgggattacatgtatgaaccactgcacccggctctgttttaccatctaacaggatgcaggtgattcctttctaatcaccatcaatggtgatcagaacttttaagaaaaattctaagaacttaaaaaaaaaaaaggaaagtggtttctgaatgttatctaaagtttttccatggtgaaataatcacgtggaatttttctccttttatcttttcattgaataaatgaagctttctaaagctgaactttccttgtctctttggaataagaccccgcatactcctagtatagtgtcttttaaagcacagctgaactcaatttgctaatgttttattcagcatttttgcatgcaccaagagccctgacctcttcctggcagctcagtaccctgcagctgagccgattcccataggaatcctggaacttctgcataaggtcaactgggtgacttcaaccaagcagctccagaggcctcctcccagaatctcctcttcctctgggcaaccctgctgcctaccccagcaccccaggcagtgcccttgcctcctgttcctcctcgtcctctgagccctgtcttgcagccctgttgaatgttctcctaaatggctgggaggtggggcccctccccttcaggtccacaggcttgtctctgtctcccctgctgatcttggtatctgtagcttaagccaatactgaggccctgaattcctattctttctggtacagcgggagagttgtcaagaagccaggtggagcagaagacaagaccaggcaggaagcaggtaagtttccactggaatgactccacttgcctcctaccgaggcccagggctgtgtcagcttcaggtgcagctggctccaggcccacctggggcacagcacggcaaggatggaaggtctcccctacatcctattctccccagagccaggtctgagacgggctgggattgaggatcatcccaaaactggtggctctcaggaggtagctcacctcatgccacctaccccaccaagatggaatctttttttttttttttttttgagacagactcttgctctgtcacccaggctggagtgcagtagcatattcttggctcactgcaacctccgtctcccgggttcaagcgattctcctgcctcagcctcccgagtagctgggattacaggcacccgccaccacacccagctaattttcatatttttagtagagacaaggtttcgccatgttggccagtctggtcttgaactcctgacctcaagtgatctgcccacctaggccttccaaaatgctgggattataggcgtgagccaccactcctggcctaaggatggaatcttgatgaaattgctgtgtggcctgcagccagtcgctgcccctctctgggtcatccacgttgctttctccaagtcctgacctggcaatggattgttcaaggagctggtcaaatccacagttgccccagcaatgcagagccctcaaacatgaaaaaaaaaaatctagacagaaagatttttttttttcttagaaaaatgagccaggtgcagtgcctcacgcctgtaatcccaccactttgggaggtggggcgatcatctgagcccaggagtttgagaccagcctgggcaacatggtgaaactgcatctctacaaaaaatacaaatattagcctggtatggtgatgcatgcctgtggtcccagctacacaggaggctgaggtgggaggatcgcccgagcctgggaagttgaggctgcagtgagttgtgatcatgctactgcacttcagcctgggtgatgggagtgagaccctgcctcaaaaatctaaaaaaagaaaaaaaaagaatattagattacaaaattcacattactgtggaaattgcttttgcccttccaaaacaaatcataaaacatgtttcctggtgaatacatacaaatcttactaaatcttcttttgaatacatataaatcttattaaatcttcttttaatttatttttttaaatttggcttttcttttttctttttaatcacaaaataatttcaagagccaatttgtcctggaggccttgttatgaaaatctgcagacccctgcggctctcatgtttgacgaaatcaagaaaaacattaacacaatcgttgcagaagggtgaccaatgcggttgctttgcggctgagtattggttttatttcaaaacacaatgtaagaggaacaaacaaaacacacatcccactcaacaccacacttctgacaccagatgtgtgggttgtctttattttttccacatagtaagcaattctccagtggacaccagctgggattcctctgatgcaatttggttccgatgctatctactcggacacagcatcagatcccgcaggttaagggctcaatcccacaaaacagcccgccttgagacacaatggtctctatagagtgggataccccacccttgcaacctgcagatgtgttcatcaactcggaagctcttcaaaccccatcttttggggatttttatgggggcttcattatgaaggcatgattgattattaactcagtccctagcccctctccggtctccagagaaagagggtggggctgaaagctccaagcttctaatgatggcttggtcttgttggtccccacccaggaacccaccaagagtcatctttttagaaccaaagacgctcctatcacccaggaaactctaggggatttaggagctctatgtcagacactcccatcactctgtcaggaactggggtcaaaagaccaaatatttatttatttatttatttattattattttgagacggagtctcgttctgttgtcaggctggagcgcagtggtgcgatctcagctcactgcagcctccgcctcctgggttcaagcgattctcctgcctcagcctaccgagtagctgggactacaggtgtgcgccacaggcctggctaatgtttgtatttttagtagagatgaggttttgttatgttggccaccctggtctcaaactcctggcctcaagtgatctgcccacttccacctcccaaagtgctgggattacaggcatgagccaccctgcccagactatttatttttatttttaaacttttctttagaaaaagaatcttgctgtgttgcccagggtggagtgcagtggggagatgttgattcactgcagcctcaaactctcaggctcaatcaatcctcccacctcagcctcccgagtagctgggactataggcacacaccaccatgcccagctaattttttatcttttgtagagacagcaactcactaagttgcccaggctggtcttgaactcctgggctgaagcaatcctcctgcttcagcctcccaaagtgctgggattataggcatgagccaccacacccagccccatgccctgtttttcactggtgcatattttctaccagaaatgagagttttaggtatgaatgaagactagtctgtgtgaaaacctgtaattgtgcttttgaaaaaagatctccaggtcttcacaaaactttttattccctgaggatgccccactgcaaacgcctgtgaagctggagtgccagacactgaggcctgaggctgggggacacagaggctaccagcttgcttggacctcctcaatctgtcaaagaaactggcttggggaccactggaggacccaaatctccctcttctctgggcagtgggtcttgtgcatgctggccttggacctactgaaggcccttccagccccagtgctattctctgaattcatggggagcagaggtgttgggactgagtcctgttggagactccagaaacactgacgtttcttgtttggtcctggggttaggtaacgacggctgtttctttttttctttctttctttcttttttttttttttttttttgaggtggagtcttgctctgtcacacgggctagaatacagtggtgtgatcttggctcactgcaacctccaccccctgggttcaagcgattctcctgcctcagcctctcgagtaactgggattacaggcatgcaccactacccccagctaattttgtatttttagtagagatgggatttctccatgttggtcaggttaatctcaaactcctgagctcaggtgatccacccacctcggcctcccaaagtgctgggattacaggtgtgagccaccacacctggccagcaatttatttttagtcagttgtggactatcctgggtggctcctgcctagattattctaagaatttcttttttcttttttttttattttaagacaaggtcttactctgtcgcccaggctggagtgcagtgatgtgatcttggctcattgcaacctccacctccccagttcaagcaattctcctgcctcagcctcccaagtagctgggattacaggcacctgccaccgtacccagctaagttttgtatttttagtagggacggcatttcaccatggtggccaggctggtcttgaactgctcatctcaggtgatccacccacctcggcctcccaaagtgctgggattacatgcttgaaccaccggcgcctggcctattctaagaatttcaccatttggacagctattagccagctttggttggtcatgtgggtccccactgcattcaactcagtcctagcctgatcttcagtttccaacaatatcataatatcattgagatagtgtattattacacttaagatctgcaccaagtccaaatcccacttctgacaccaaaagtaaaaagaaaacataaattaatttttttttctgctcacacatcactcaacacaacattcctttcttttcttttttcttttttgagacggagtctcattctgtcacccaggctgtagtgcaatggcgtgatctctgctcactgcaaccttctgcctcccgggttcaaacgattcgcctacctcggcctcccgtgtagctgggactacaggtatgcaccaccatgcccagctaacttttgtatttttagtagagatggagtttcaccatgttgcccaggctggtctcgaactcctgacctcaggtgatctgccagcctcagactcccaaagtgctgggattacaggcatgagccactgtgcccagccttaacacaacatttctgacaccagatgtatgggaacttttccaaacgtcaagtaattctccagcagacaccagctgggtggggttttttgtttgatttttttgtctttttatttttttaggtgggtgtttttaaattcaattcagttcagaagctatctacctgaagatagtatcagatcccataggttaagggctcagtcccacaagatggtccctactgcagatgccatctgcaaacagtaggttttcacctgtacttctaatgcactggctgtaaatcaagactcccttaggctgggcacagagtcccctcctgtaatcccagcactttgggaggccaaggtgggaagatcacttgagctcaggagtttgagaccagcctgggcaacatggtgaaaccccatctttacaaaaaatacaaaaaattagctgggcatagtggtgtgcacctgtggtcccagttacttaggaggctgaaatgggagaatcgcttgagcccaggaggtggaggttgccgtgagccaagatcgcatcattgcactccaggctgggcaacagagcaagaccccatcttaaaaaaaaatggtggctggccgcagtggctcatggttgtaatcccagcactttgggaggccaaggtgggcagatcacctgaggtcaggagttcaagacccgtctctactaaaaatacaaaaattagctgggtgtggtggcatgtgcctgtaatcccagctactcaggaggctgagacagaagaatcacttgaacccaggaggcggaggttgcagtgagccgagattgcaccattgcactccagcctgggcaacaagagtgaaaatgtcatctcaaaaacatttttttaagtactatttttttaaagaagtgggggtggccaggtgcagtggttcacacctgtaatcccagcactttgggaggccaaggtgggagaatcagtcaagctcaggaattcaagaccagatagcacaacatggtgaaaccctatctctacaaaaaaatacaaaaaaatagccagctgttggaggcacacacctgaggtccctgctacataggaggctgaggtgggaggattgcttgagcctgggagatggacactgcagtgagccaagatcaccccagcactccagcctcggtgatagaacaagaccctgctaaaaaaaaaaaaaaaaaaaaaaaaaggtggctaggcacagtggctcatgcctgtaatctcagcactttgggaggctgaggcaggtgatcacctgaggtcaggagtttgagaccagcctggccaacatagtgaaaccccgtctctactaaaaaaaaacttagccgggcatggtggcacacatctgtaatcccagctacctgggaggctgaggcaggagaattgcttgaacccaagaggtggaggttgcagtgagccaagattgcgccattgcactccgccctgggcaaaaagagtgaaactccatctcaaaaaaagaaaaagaaaacaataatactcacacctgtaatcccagcactttgggagcctgaagcgggcggatcacctgaagtcaggagttcaagaccagcctgaccaacatggagaaatctcgtctctaccaaaaatacacaattagccgggtgtggtggcacatgcctgtaatcccagctactcaggaggctgaggcaggagagtcgcttgaacctgggaggtggaggttgcagtgagccaagattgcaccactgtattccagcctgggcaacaagagcgaaactccatctcaaaataataataataataaaaaaagattcaggtgaacagccagatgaggagatacctagagcagggtctggagggagacaggagcttctgcctccatggagtggggtccaccacccttctggtatgtggaagtgtttaccaatgtggaagctcttcaaactccgtagttgagggatttttatggaagctttattatgaagccatgatcgattattaactccatttccagcccctcttccctctccagagaaagggggtgaggctgaaagctccaggcttgtaatcatggcttggtcttcttggtccccaacccaggaacctcccaagcgtcacctcattagaacaaaagacactcctgtcacccaggaaatcccaaggaaatttggaactctgcgtcagatgttcccatcagactacatcagattacaaagttctcaggagctctgtgtcaggaactgggacaaagaccaaatatttatcttaccataaatcacaataccagccaggcacagtgactcacacctgtaatctcagcactttgggaggctgaggtgggtggatcacctgaggtcaggagtttgagaccagtctggccaacatgcagaaaccccgtctctactaaaaatacagaaattacctgggcttggtagtgcacacctgtaatcctagctactcccgaggctgaggcatgagaatcgcttgaacctgggaatgggagcttgcagtgagccgagatcccaccactgcactccagcctgggcaacaggctgcctaaaaacaaaacaaaacaaaaaagtgtgcccttggctggaggtgtggccagagtaaagaccccagcctcagttgctggtggggaaggtcatgtttgatatagggaaagaggcaccagattggcagctatcagaacaaagggaaaacacacccaaggtgaacaaaggctgcagggagcccacagattgcagtttactggggagaaatgtcaagttcagaaagcaaacagaggctttgtgtctctgaggggcttggttgcacgttaacgcccggttcctgccccagcccaccctggcccagccatcctgcacggaagcacaggctgtttgctgaattcaatccttgcctaaacatttgtttatttgagacaagatgcctgcgggggcctcatggccaggtcagagctcacagctggggcagaggaggagaggctgcagaaggctggacctgtaggtttgtctccaactctgagactccaggcggggagtcctggggtcagagcatggacagggctcatagtgttgggtcacagactcaagactctccaggtttcctcataaaaaggaaggaaacagccgtgcgcagtggctcacgcctgtaatcccagcactttgggaggcagaggcaggcagatcacttgacgtcaggagtttgagaccagtctggccaacaaggcaaaaccccatctctacaaaaaaaaaaaaaaaaaaaaaaacacaaaaattagccaggtgtggtggcacgcacctgtaatcccagctactcaggaggctgaggcacaagaatcacttgaacctggaaggtggaggttaaagtgagctgagatcccaccactgcactccagcctgggcaacagagtaagactgtctcaaaaaaaaaaaaaagagagagagagaaaatctaatgcctgatgatctgttactgtctcccatcactcccagatgggactatctagttgcagaaaataaagctcagggctcccactgattctacattatggtcagttgtattattacaatgtaataataacagaaataggccaggtgcagtggctcatgcctgtaatcccagcactttgggaggccaaggcaggtggatcacgaggtcagaagttcgagactagcctggccaatatggtgaaaccccgtctccactaaaaatacaaaaatggctccctctccctctccccaccatctccctctccctctctccacggtctccctctgatgccgagctgaagctggacggtactgctgcctgattctcctgcctcagcctgccgactgcctgcgattgcaggcgcgcgccgccacgcctgactggttttcgtattttttttggtggagacggggtttcgctgtgttggctgggctggtctccagctcctaaccgcgagtgatctgccagcctcggcatcctgaagtgccgggattgcagacagagtctcgttcactccgtgctcaatggtgcccaggctggagtgcagtggcgtgatctcggctcgctacaaccttcacctcccagcagcctgccttggcctcccaaagtgccgagattgcagcctctgcccggccgccaccccgtctgggaagtgaggagcgtctctgcccggccgcccatcgtctgggatgtgagaagcccctctgcctggctacccagtctggaaagtgaggagcgtctctgcccagccgccatcccatctaggaagtgaggagcgcctcttcccggccgccatcccatatgggaagtgaggagcgtctctgcccggccccccatcgtctgagatgtggggagcacctctgccctgccgccccgtccgggatgtgaggagcgtctctgcccggccgccccatctgagaagtggggagaccctctgcctggcaaccgccccgtctgagaagtgaggagcccctccgcccggcaaccgccccgtctgagaagtgagaagcccctccgcccagcagccaccccgtctgggaagtgaggagcatctccgcccggcagccacctcgtccggcagggaggtgggggggtcagccccccgcccggccagccgccccgtccgggagggaggtggggggggtcagccccccacctggccagccgccccgtccgggaggtgaggggcgcctctgcccggccgcccctactgggaagtgaggagcccctctgcccagccagccgccccgtccaggagggaggtggggggtcagccccccgcccggccagccgctccgtccgggagggaggtgggggggtcagccccccacccggctagccgccccgtctgggaagtgaggggcgcctctgcccggccgcccctactgggaagtgaggagcccctctgcccggccagccgccccgtccgggagggaggtgggggggtcagccccccgcccggccagctgccccatctgggagggagatggggggtcagcccccgtcccggccagccgccccgttcgggaggtgaggggcgcctctgcccggccgcccctactgggaagtgaggagcccctctgcccggccaccaccccgtctgggaggtgtacccaacagctcattgagaacgggccatgatgacaatggcggttttgtggaatagaaaaggggggaaaggtggggaaaagattgagaaatcggatggttgccgtgtctgtgtagaaagaggtagacatgggagacttttcattttgttctgtactaagaaaaattcttctgccttgggatcctgttgatctgtgaccttacccccaaccctgtgctatctgaaacacgtgctgtatccactcagggttgaatggattaagggcggtgcaagatgtgctttgttaaacagatgcttgaaggcagcatgctcgttaagagtcatcaccactccctaatctcaagtacccaggaacgcaaacactgcggaaggccacagggtcctctgcctaggaaaaccagagacctttgttcacttgtttatctgctgaccttccctccactattgtcctgtgactctgccaaatccccttctgtgagaaacacccaagaatgatcaattaaaaaataaaaaaaaataaaaaataaaatacaaaaatgagctgggcagggtggcgggcgcctataatcctggctacttgggaggctgaggcaggagaatcgcttgaacctgggaggcagaggttgcagtgaaccaagatcgcaaatttccctccagcctggtcaacaagagcgaaactctgtctcgaaaaaacatatatataataatactaaagtgcacagtaaatgtaatctgcttgaaacattctgaaaccattcccctccctgcctcctgagtagctgggactacaggcacatgcagcacacccagctcatttaaaaaaaaaatgatttttttttttttttggtagagatggggctttactatgttgtccatgctagtcttgaactcctagcctcaagggatcctcctgccttggcctcagaaagcactggattccaggccataagccaccactgttttttttttttttttttttgagacggagtctcactctgtcacccaggctggagtgcagtggtgcgatctcagctcactgcaaactctgcttcctgggttgaagcaattctcctgcctcagcctcctgagtagctggaataacaggcatgcaccactaattttttgtatttttagcagaaacggggtttcatcatgttggtcaggctggcctcaaactcctgacctcaagtgatctgcctgccctggcctcccaaagtgctgggattacaagtgtgagccaccaccgccagcccttttgcttatttatctagcattaagaaatccagaacgaggtagcttcacaagtttcttcttggttgttttgttgttgttgtttttgttgttgtttagagagagtctcgctctgttgcctaggctggagtgcagtgacgtgatctcggctcactgcaacctctgcctcctgggctcaagcaattctcctgcctcagcctcccgagtagctgggactacaggtgtgtgccaccatgcccgggtaatttttgtatttttagtggagatggggtttcaccatgttgtccaggctggtcttgaactcctgacctcaggtgatccagccaccttggccacccaaagtgctgggattataggtgtgagccaccacacctggtccacatgtttcttctttacctgctccatgatgccacagattttcttttaggttctgccatctctagtgtgttccctttttcctcatgcttgttgcctcttgttgcagaatggctgctgcagctccagacatcacattcaaggcagaaacaagagggtaagggggaaagccagctgcatttccctttgatcagataaaggcataaaaatatttcctagaaattcccatggcatccttcctcttagggctcattggtcagaactgggtcctgggccacctctacctgcagaggcagctgggaaactggagaatagaaagccattgtcttttaaatctaatttcagaagtgatggctccttgcttctattgcataatattgattaaaaggcagtcagtaaaggctgggcgtggtggctcacacctgtaatcccagcactttgggaagccaaggcaggcagatcccttgaagccaggagttcaagaccagcctggccaacatggtgaaaccccatctccactaaaaatacaaaaattagccaggtgtggtggtgggcacctgtaatcccagctactcactcgggaggctgaggcaggagaattgtttgaacccaggaggcagaggttatagtgagccaagatcaccactgcactccagcctgggtgacagagtgagaccctgtctcaaaaaaaaaaaaaaaaaaggcaatcagctcgcattcgaagagagggaattcgagaaaagtcagaatgccaggaggtggggatcactgcaaaccatcttaaaggcttcccccatggccaaatgcactggctcatgcctgtaatcctagtgctttgggagtctgaggcaggaggatcgcttgagttcaggagttcaagaccagcctgggcaacgcagagtgaccccatccctacctcaaaaaaaaaagaaaaaaaagaaacatttagctgggcattgtggcccatgcctttggtcccagctactcgggaggctaaggcaggaggactgcctgagctcaggagtttgaggctacggtgagctgtgacagtgccaatgcactccagcctgggcaacaaagcaagactctgtctcaataaacaaataaatgagtgagccacacagtaatcccttaagggaaggggttttcttttttttcttttctttttttttttttttttttttttttgagacagagtctcactctcttgccaggttggaatgcagaatgtactgtgagacaatacatttctgcagtttttttgtttttctgcttttggttgttgttgttgagacagtgtcttgttctatcacccaggcaggagtgcagtggcacgatctcggctcactgcaacctccgcctcccgggttcaagcaattctcctgcctcagcctcccaagtaactaggactacaggcatgcaccatcacatccggttaatttttgtatttttagtggagacggggttttaccatgttgtccaggatggtctcaatctcctgacttcgtgatctgcccacctcggcctcccaaagtgctgggattacaggtatgagccactgtgcccggccagggaagggattttctaaggtcagttaaacagttcctgcagctgctgaggcgtccctaagaacacattgactattatcacaacaaggataatcccaatatttgtttccagtcttgatgggctgggcttactgatagggttgtaatgatttcagcagaagcagtttgtggacataagattaagatccaattttgaaggatgaaggttgagattaagtatgtgaagaaaatgtacattctaggaggggcctaaagaaggaaatctatgacaggaggttcctgaggctgatgtaacccagctccacaaactaggtggcttaaaacagcagaaaaggccggacatgatggcatacacctgtaatcccagcactttgggaggccgaggcaggaggattgcttgagccaaggagttcaagaccaacctgggccacgtggcgaaaccccgtatctaaaaaaatacaaaaagttagccaggtatgatggtgcacacctgtagtcccggctactagggaagctgaaatgggaggattgcttgagtccaggaggtggaggttgcagtgagctgagatcgtgccactgcactcccgcctgggtgatagaacaagacactgtctcaacaacaacaataacaaaaagcagaaaaacaaaaaactgcagaaatgtattgtctcacagttctagaggccagaagtccgaaatcaaggtgtgggcagtgctggttccttctggagactcctagagagaatccatcccaggcctctctcctggcttcagccatccttggcaattccttggcttgtggcctcatctctccagtcactgccttcttcatcacatggccccatgttccaaattccctcgtctttgttttttggttttttatttatttattatttatttatttatgagatgaagtttcgctcttgttgcctgggctggagtgcaatggcgtgatcttggctcactgcaacctccgcctcccggattccagcaattctgactcagccttccgagtacctgggattacaggctcgcgccgccacgcccaggtaattttttgtatttttagtagagatggggtttcaccgtgttgaccaggttggtctcgaactcctgacctcagggtgcctctgcctctcaaagtgctgggattacaggcacgagccactgtgcccggcctgattttttattttttagacagagtctcactctgtcacccacgctggagtgcagtggcataatcatggctcattgcagcctcaacctcctgggctcaagcaatcctcccacctcagcctcctgagtagctgggaccacaactatgcgccatcacacttggctattttttttttttttttttttttgagatggagtctcactctgtcgcccaggctggagtgcagtagcgtgatctcggcccactgcaacctccacctctcagcttcaagtgattctcgtgcctcagcttcccaagcagctgggattacaggcgaccaccaccatgctgggccaatttttgtatttttagtagagacagggtttcgccaggttggtcaggctggtctgaaacgccagacctcaagtgatccgcccaccccagcctcctaaagtgctgggattacaggcgtgagccacagtgcccagccccacacttggctaattttttaaatttttgtgtagatggggtcttgccatgttgcccaggctggctttatttattttaagcccttcttttttgcccaattcatttaacactttatttattatttttgaaattattctttctatttttattcatttttttaggagacagtgtctcactctgtcactcaggctggagtgcattggcatgatcaatgttcactgcagcctcaaccttctgggctcaagtgatcctcctgcctcagcctcctgaatagctgagactacaggtgcatgcccccatgcctggctaattttttttttgagatggagtctcgctctgtcgctcaggctggagtgcagtggcacaatctcggctcactgcaagctctgcctcccgggttcacgccattctcctgccttagcctccccagtagctgggactacaggcgcccgccaccacgcctggctaattttttgtatttttagtagagacagggtttcaccgtgttagccaggatggtctcgatctcctgacctgttgacccgcccgccttggcttcccaaagtgctgggattacaggcgtgagccaccgcgcccagccctggctaatttttaaaactttttttagatagagacatggtctctctatgttgcccaggctggtcttgaactccagagatcaagtgatcctctggctttagcctctcaaagtgctgggattacaggcatgagccactgtgcctggcttttttgtagaaatggggtcttcttgtgttgcccaggctggtctcaaacttctaggctcaaagcaatcctccctccttggtcttccaaagtgctggaattacaagtgtgaactgccatgcttgaccctagacatttcttcttcttcgtctttgagacagagtctcactctatcacccaggctggagtgcaatggcacgatctcagctcactgcaaacctccgcctcctgggttcaagcgattctcctccctcagcctcccaagtagctgggattacaggcaccaccaccacacccagctaacttttgtatttttagtagagacagggtttcaccatgttgatcaggctggtctcgaactcctgacctcaggtgatttgcctgcctcagcctcccaaagtgctgggattataggtgtgagccaccatgcctggccatgaccctggacattttttttttttttttgagacagagtctcgctctgtcgcccaggctggagtgcaatggcgcaatcccggctcactgcaacctctgcttcccgggttcaagagattctcctgcctcagcctcccgagtagctgggattacaggtgcccgccaccacgtccagctaagttttttgtatttttaatatagatggggtttcaccaggttaccaggctggtctcaaacccctgacctcaggtgatccacccgcctcggcctcccaaagtgctgggattacaggcgtgagccaccatgcccggcctaccctggacatttttataaatggaatcagacactctatgggcttttgtgcctggcttctttcactcagcctcgtgttttcagggttcatccgtgctgtgggatggatcagtgcttcattcctttttatggctgcatagtattccatttcgtggattgaccacagtctgttgatccatgcatcctttaagggaacagctgaattgtttccaccttttggcgatagtgaacaatactgctataaacgtgtgtgtcttttagtcctttttgaatagttaactggagtggatactccttttctcttttttttttttgagatggggtctcactctgtcacccaggctggagtgcagtggtgtgatctcagctcactgcaacttccacctcccaggttcaagcagttctcctgcctcagactcccgagtagctgggactgcaggtatgcaccaccacacctggctgagttttgtatttttagtagagacagagtttcactatattggtcaggctggtctcgaactcttgacctcaggtgatatacctgcttcggcctcccaaagtgccaggattataggcgtgggccaccatgcccagccataaagtggacactcctattctggacatagaatgacaatgatttttctgcacatagaatgacaatgatttttccacacatagaataacagtgattttccttttctttctctctcttttttttaaattggagacagggtctcacttttgtcacctaggctggagtggtgtgactgtatctcactgcagtcactcctttggccaggggatggggaggtttggccatgtctgtggtttggacaatgctcttattttcatctgtggtaagactcaattacggaagggttttgatttttgtctggtttcatcctggacagagtggccctgtttgatgtggtcattctgtgaaatcgtatatgttcaaccaaagaactcctcggcttcactgtgactaccaggtcaactcccagttgaccagagcctggggccaattttttcttctttactttacattcaccttctcgcctttgcatatgctgttcctgctgctcagaatgcctttccctccctgtcttcactcagctctttccttctcaattttcagagtgctcttaaatgccacctcctctgagaagccctctgtgatcacccaggctgtgggcctctataacccatttcagcaccagacacatcttttggtcacagtaaggattttttttttttttttgagcgagggtctcactctgttgctcaagctggagtgcatgcaggcagtgcaatggtggctcactgcagtctccaactcctgggctcaagtaatcctcttgagtagctgggaagacgagcttgccaccacgccagctgattttttttttatttttgtagagacaggggtctctctatcttgtccaggcaggtctcaaaactcctggcctcaagtgatcttcccactttggtctcccaaagtgctaggattacaggcgtgagccactgtggctggcctgtcatctttcaagtttcccaagtgaggagaaaagggatggagaaggccaaaaaaaaaaataagttagaagaacagttcttcctataggtctcaatatgttgccatgttcctattgaaagaaagaaagagaaagagagaaagaaaaggaaggaaggagagagagagagatcagaaagaaaagaaagggaaaggaaggaaagatggaagacaggaaggaaagagaaagaaagaaaagaaagaaaagaaaagaaaagaaaaagggaaaggaaggaagaaaaaagaaagaaaaagaacggagataaagggggctctagacaaacataaaaattggatcttcaaaagataattaattggccaggtgcggtggctcacgcctgtaatcccagcactttgggaggccaaggcgggcggagcacctgaggtcagaagttcgagactagcctggccaacatggcaaaaacccgtctctactaaaaatacaaaaattagtcaggcatggtggctcacacctgtagtcccagcactttgggaggccaaggtgggaggatctcttgagcccagcagttcgagaccagcctgggcaacagagggagaccctatcacaattttttaaaaaacatttcaagtagccaggtatggtggtacacacctgtagtcccagctactcgggaggctgaggcaggaggatcgtttgagcctgggaggtcgaggctgcagtgagctatgactgcactactgcactccagcctgagcaacagagtgagaccctgtctcaaataaataaataaataaataaataacacaacagatgatcgcctcatgagaattttgtctttccgttgtaagtctcctctccagtggaaaagtctcacagtggccactcaaattctaaattgtccccagtgtgaggtaccattggagagagacatgtttggttttggttttgtttttttgagacaggatctggctctgtcacctaggttggagtgccgtattgtgatcatggttcactgcaacctctgcctcccgggctcaagcgattctcctgcctcagcctcccgagtagctgggactacagaagcacaacactgcgcacagcttccttctaagattttgaaatggtgaaaagttgcccaaaggacagtggtccaaggagatctttggaatactttggccatcaacactgactcaagggtgacttactgagtctaggcccgtcctctctttatcgacgtttcccccgatggacccacagtgcaatcccagcactttgggaggtcgaggcaggaggatcacttgagcccaggattcgagatcagcctgggcaacatggcgagaccctgtctctacaaaaagtagaaaaattggctgggtgcggtggctcacacctgtaatcccagcactttgggaggccgagatgggcggatcacaaggttgagagatcaagaccatcctggccaacatggtgaaacgctgtctctactaaaaatacaaaaattagctaggctctgtggtgaggcctgtagtcccagctacttgggaggctgaggcaggaggatcacttgagcccaggattcgagatcagcctgggcaacatggtgagaccctgtctctacaaaaagtagaaaaattggctgggtgcggtggctcacacctgtaatcccagcactttgggaggccgagatgggcggatcacaaggttgagagatcaagaccatcctggccaacatggtgaaacgctgtctctactaaaaatacaaaaattagctgggctttgtggtgaggcctgtagtcccagctacttgggaggctgaggcaggaggatcacttgagcccaggaggtcgaggctgcagtgagccaagattgcaccactccacttttacctgggcaacaaagtgagaccttgattttagacttgaagcctccaggactatgagagaattgatttgcattgtttccttttttttttttgagacagagtcttgctctgtctcccaggctgcggtgcagtggcactatctcggctcactgcaacctctgccccccaggttcaagagattcttctgcctcagcctcctgagtagctgggattacaggcgtacaccaccatgtccggctaatttttgtatttttagtagagacggggtttcaccatgttggtcaggctggtctcgatctcctgatctcaggagatccacctgccttggccttccaaagtgctgggattacaggcatgagccaccacgctcagccaatttctgttgttttcaaaaccactagtttgtggtcatttgctactgtagccaccagaaactcatacagccctgtacaagagacagtccacaggaggaggtgtcgagagagaaaacaatttcaccaaggaacagagtggctgatcagaaaaccaaaaagccgtggagaaactcattcctagaatagtaaacgaaattaaccctacacagaagggccctaatgagatcataactgaagctccagtcagcattaacttaccttccagccacaggcagaatcaccttaagcagatagagacacaagggtctcagatgtgcacactattttttttttttttgagacagagtcttgctctgtcacccaggctggagttcagtggtgcagtctcagctcactgcaatctctgcctcccgggttcaagcgatcctcctgcctcagcctcctgagtagctgggattacaggcacacaccaccatgcccagctactttttgtatttttggtagagacggggtttcaccctgttggccaggctggtcttcaactcctgacctcagatgatctgccttccttggcctccccaagtgctgggattacaggcgtgagccaccgtgcctgacctcagatgggtgcacttttgctgagtccagggtactgattggtggcagggaaggtctcagcccagtctcagtaggacatccagtcctgttgatgtcaaataccaccagaaaaacagctgcagtgaaacccagctgggtttatggattaatgcattgaaggaagacacaccagaaggggttctgtttatctcagaaagagaaagtgagaaggagcgtgttacagaactagggcaactgtggggtgattcgaggagagttcaagggagtgggattctgccctggattgtatgcaaacagctagtgggacaattctctaagtattttaataatctctttttttttttttgagatggagtcttgctctgtcccccaggctggagtacagtggtgtgttctccgctcactgcaagctctgcctcccgggttcacgccattctcctgcctcagcctcctgagcagctgggactacaggcgcccaccaccacacccggctaattttttgtatttttagtagagatggggtttcaccgtgttagccaggatggtctcgatctcctgacctcgtgatctgcctgccttggcctcccaaagtgctgggattacaggcgtgagccaccgcgcccggcctttaataatctttttacctagaaggcgggggaacctgctgggaattggcgaaaactagcagtcacgccctttggccaggagatggggaggtttggccatttttgtggtttggacaatgctcttgtattcacctgtgctaagactcgattacggaagggttttgtttttctgcggccaagtgtgactggtctgagtgtccctgtctgatgtggacattccgtgaaattggtttggtcaatcaaaaaactctacagtttagctgtgactgccaggccaactgctagctgactgtgtgtggtccagggctacttttatcttcctcactttatattcacctcctcacctttgcatatactgttccctctgcccagaacacctttccctctctttttcactcagctctttccttctcaagcttcagagctctccttaaatgccaccacctctgagaagccctctttgatcacccaggctgtgggcctccacaaccctatttcaaccccaggcacatcttttagtcacaattacgattattattttattgttattattattattattacttttgagacagagtcttactctgtcacccaggctgcagtgcagtggcgtgatctcagctcactgcaacctctgcctcccaggttcaagcgattctcctgcctcagcctcccaagtagctgggattacaggcgcatgccaccacgcctgggtaatttttagatggggtttcaccatgttagccaggctggtcttgaactactcaccaagtgatctgcccgcctcagtctcctgaagtgctgggattacagctataagccaccacgcctggcctttattattattatttatttatttattttgagatggagttgcactctgtagcccaggctggagtgcaatggcacgatctcggctcattgcaatctctgcctcctggggtcaagtgattctcctgcctcagcctcccaagtagctgggattacaggcatgtgccaccacgcccagctaatttttgtgtttttagtagaaacagggtttcaccatgttggtcagactggtctcaaactcctgacctcaggtgatctgcctggctcggcctcccaaagtgctaggattacaggcgtgagccaccatgcctggcctttattagtattttttaagagaggttccttcacccaggctggctggagtgcagtggcgctatcatacctcactgcaccctccaacttctgggctcaagtgattctcttgaatgggaggatgagcatgccaccacgcccagctaatgtttttatcttctgtcgagatggggtctcataatgttgcccaggctgctttcaaacacctggcctcaagcgatcctcccaccttagccttccaaagggttgggatcacaggcatgtgccactgcgaccagccaggataataatctttcatgtgattttccgactttaagccccctgcacccagagacctttctgtctcatgcctgaagggaaggaactggccacggaaaaacctgggaaattcctgggggaactccctgaggcaagactgcgcctggcaatttgtaagaagggggctggtgcgacctgagcagagagctaatgggagggtgagggaagccaagggagatggggtgggaggtgggaggagtcttgcgggacaatgggaacccaggggaggcgttagagcaggggaggtgcatcgcgcactgggatttaggtcccagcaaggtcgctggggggatgccttttagggaatggactctgtggtcaactactcctacctgaactgcccccaaagcatttgcttttccctctccacagtcaggaccagtgtaaccttagacccctaatactgccatttttactgttgagaacaccgagaagtagtaaatgcagaaaatctaaagtatagtgcctaagacaaattggcgcctcaaacctaatttctaaataaaattaataaataatattgcagaagtggggagcaggtcagcaatccaggaagaggcactggcaggagcaagagacggaatttgagcctactcgcggttatgagcctactcgcggttacattttggccaaactcaattcctggtctctctgagcctcggtttccctacctggactgcgcggtgtgtgttaatttctctgccccatttatctcccctctcctagccccgccccagcgtcaccagtgggacgcagagactcaggactaggaaagcacttttaaagcgttaagggattgcgaagagctacggagaggcttcctcagggctatactgggtccacctcccctcatggaccgcgggcgcgctctggcggccgggccgctccaggctgaagccgccggaccacgtgtgtagtcgcagctgccatctttcatccgggcatcggccatcttggtaaaggcaatgttctagattttcgcctctgcccgcccctcctggttcatcaacatattaaatgagcgtagggaatgagggcgtattaagtgtcctctttttgaagagacaaagaagtggctgactaccctggcttgggtccgaggcccagccatctttttctttaccaaaatggcggcggtactgaggcgcaatgagtgcgcgccgccaggagctcagcgcgcaggccccatgatgacgtcacggaggcgcgaccgggccggcgctggggtaagaaggtaggagcgtctgcggcgcgggcggaacccgggttcggggagcagaggcgcggggcgggggctgcttggcctgggaccatcccctgggaaggctggaggaggggtgctgggaggcaggagcacttctggcgtccagtctgaaccgcacctagttgggggcgatgcccatttccagactagacgattgaagcccgacgcgacagcatgttcgaggccacctggccccggactgcccctaggcagcttctggtctcgagagggacagagttgggcgcggactcccccggcctcttgtagggggattagtggtgggggacttcaaaagggatagccgggagggctgcttagaggaggcattgttgaattttgtattctgttattttaccttcacatccgtggggtcttaatccccatgggtcttgattcgcttctaagtgtgcccctcgcccagcctgagccactccctgggtaccgcctgggctcccagctcctgccatctggggagtccacctcctcactaaccccagagggcttgtgtgacccatagattgggcttcccggctctaacgccctccacaccttcccatctccctggaatacaaatcgcccccttttccagcctacctcctgcatcccgcgtgcaggctgcgctctcccccactcattcagacttttccttagatgtctcctttaggaagccctttgacccaggctgggtcagaagccctctccgggcttccccggcgccctgcgtgtccttattaggactctgattgcatgtgttggctcttctctgggagtcccatgcaggcagaaagctcatttgtgccacctctttccccagcatcgcacacgtattaggtgcccagtacatatttattgaatgacgtgtgcaagtgagtgagtgtttactacacagagaaaagtgtctgtatttccagcttgggctgtcataactaataccacagactgggtggcttaaacagcagaaattgccaggcactgtggctcacacctgtaatccaggcactttgagaggccgaggcaagcggatcacttgaggtcaagagtttgagaccagcctggccaacatagtgaaaccccgtctctactaaaaatacaaaaatcagataggcatggtggcacatgccaacatggtgaaaccccatctctataaaaatacaaaaattagccgggcgtggtggcaggtgcctgtaatcctagctgcttgggaggctgaaacaggagaattgcttgaaccgggtgggtggaggttgcagtgagccgagattgtgccactgcattccagcctgggtgaaagagcaaaactccgtctcaaaacaaaaaaaagccccaacgtggaaacagcccaaatgtctagctgtggacaatggataaacaaaatgtggcgtatccatgcagtggaggaatattcagccataaaaaggaacgaagggccaggcgcagtggctcaggcctgtaatcccagcactttggaaggccgaggcgggaggatcacttgagcccaggagttcaaggccagcctgggcaacatagtcagaccctgccttaaaaaaaaaaaaaaaaagctaggcatggtggcctgcacctatagtcccagctacttaggaggctcaggtgggaggatcacttgagcccaggaggtcaaggctgcagtaagccgagatttcgccactgcactccagcctgggcgacagagtgagaccctgtctccaaaataaataaataaatgtactctcacactgtgtggccttttgtgtctggcttctttcacttagtattgtgttgttgaggttcaaccacattgtatcatgtatgtattggtgccttgtttccttgtttcctttttttttttttcttttaagagacagggtcttgttctgttgcccaggctggagtgcagtggcacaatcatagctcactgtggcctcagcctcctacgctcaggcgatccttccacctcagcctcctaagtagctggaactacaggcacaagccactgtgcctaattattttttattttgtagagacggactcttgctatgttgcccaggctggtcttgaactcctggcctcaagcaatcctcctgcctcagcctcccaaagcacggggattacaaacgtgagtgatcgcacccggcctgtgattccattgatatggactgaaatgtccagaacagggaaagccacagagacagaaagcagattgatggttaccaggggctaggggaagaggaatagggagtgactgctgatggtgatgtggcctcttttggggggtgcaagtgttctggaactagacagaggtggtatttgcacaacgctgtgaatatacttaaacactgaattgtacacctttttttttttttgagatggagtctcgctctgtcgcctaggctggagtgcagtggtgtgatctcagctcattgcaacctccgcctcccgggttcaagtgattctcctgcctcagcctcccgagtagctgggattataggcatgtgccaccacacccagctttttggttttttttgagagtgagtctcactctgccgcctaggctggagtgcagttgcacgatctcggctcactgcaacctctgcctcccaggttcaagcggctttcctgcctcagcctcctgagtagctgggattaaaggtgtccgccaccacacccagcaatttttatttatttttagttgacacggggtttcaccatgttgactagactggttttgaactcctgacctcaggtgatccgcccaccttggcctcccaaagtgctaggattacaggcgtgagccactgtgcctggccggaattgtccacctttaaattgattctttttcctttcattgagacggagtctcactctgtcgcccaggctggagtgcagtggcacgatcttggctcacttcaacctccacctcccgggttcgagcgattctcctgcctcagcctcctgactggctgggaatacgggtgcacaccaccatgcccagctaatttttgtatttttagtggagatggggttttgccgtgttggccaggctagtctcgaacttctgaccgcaagtgatccgcccgcctcggcctcccaaagtgctgggattacgggtgtgagccaccagacctggcctaaatgagctcatttggtgtcatgatgtgaattttgccttaataaacttttacaaggagagcgctaagtccaaagcccttgttttatacagagaaggccacagaggccccaagagggtcatggctgcccaagtgtgattctgggggtgctgagtgccgatgtcccctccggcccctgctcccccatccccatcctcttcccgcagcctgctgagggatgcccaagaagttccagggtgagaacaccaagtcggcagcggcccgggcacgtagggcagaggccaaggcggccgctgatgccaagaagcagaaggagctggaggatgcctactggaaggacgacgacaaacacgtcatgaggaaggagcagcgcaaggtgcgtgcactccgagtccccgcggcccgcatgccttgtggccaaggccagtggtcattatgtcaatgtgggtgaatagcgagagggccctctgagctttggtctgaaaggccaggagggaccaggcgctgtcgctcacgcctgtcatcccagtactttgggaggccgaggcaggcagatcacctggggtcaggagttcaagatcagcctggccaacatgatgaaaccctgtctctactaaaaatacaaaaattaactgcgtggtggcgcacacttacagtcccagctactctggaggctgaagcagaattgcttcaactgggaggcgcaggttgcagtgagccgaggtctccccgctgcactccagcatgggcaacagagcgagattccatctcaaaaaaaaaaaaaaaaaaaaaagaggctgggcagagtgcctcatacctgtaatcccagcactttgggaggccgaggtaggcatatcacctgaggtcaggagctcaagaccagcctggccaaaatggtgaaaccctgactctactcaaaatacaaaaattagccaggcatggtggcaggctcctgtaatcccagctactcgggaggctgaggcaggagaattgcttgaacccaggaggcggaggttgcaatgagctgagattgtgccgttgcactccaacctgggcaacagagtgagacactgtctcggaaaacaaaaagcaaaatgccaggaggcactggagatggcagaggggagggaggcagaggaaatggtgtgtggaaaggccctggggtggcacagtcttgcttgtctgtggacagtgaggctgtcattgctctctgtggatgtttctctcctttgagtaatgtcagggttgggctagatggtcattctcaccgtggagctactctgcccctgaggacgcttggcaacacctggagatgtgtttggttgtcataactcggggagagggggtgttgctggcatatagaaggtggagaccagagatgctgacactctagaatgcacaggacgcccccacagcaaagaatgagccagccccagatgtcagcagtgctgaggctgagaaacgctgtgatcaggcccccatttccaacctgttgacccaggtccacaggttcttctaggtgtttattttatttttgttgttgttgttgagacagagtctccctctgttgcccaggctggagtgcaatggcgcgatctcagttcaccgcaacctttgcctcctgggttcaagtgattctcctgcctcagcctcctgagtagctggaattacgggcatgtgccaccatgcccagctaattttgcatttttagtagagatggggtttctccaggttggtcaggctggtctcgaactcccaacctcaggtgatccgcctgccttggcctcccaaaatgctgagatcacagtcctgagccaatgtgcccggcccaggtgtttattttttaaaagccgtcgtttggcgtggtagctcatgcctgtaatctcagtactttgggaggctgaggtgagaggattgcttgaggccaggagctccaggccagcctgggcaacatagcaagaccccatctccacaaaacatgtacaaattagccatgcatggtagtgtgtgcctgtggtcccagctacttgggaggctgaggtgagaggatcacttgagcctgggagttcagggctgcagtaagctataatcgtgctactgtactccagcctgggcaacagaatgagactgtgactcaagatgaatcaaaaagcccagggccaagcaccatgcttcattggtgtctgggttgtggtttagggctgatgctgacctgcttggcccagtaggtggcgccagtgacccatgctagccacagctcctggtttccacaccctgggtagctgagacactggccctctaggcaaccccccagcttaggggctgctatcctgacaacatgcccagttcttggggggaatctggacattcccacctgttttacccgtcatcttttttttgtttttttaaagacggtcttgctctgtcacccagactggagtacagtggcaggatcacagctcaatgcagtcttgacttcccgaactcaagcaagcctcctgcctcagcctcccaagtagctgggactataggcgtgcaccaccacgcccagctattgtttgtattttgtgtagggggtgggggtcatctcactgtgttgcccaagttggtctcaaactcctgggctcaaacagtcctcccacctcagcctcccaaagtgctgggattacaggcatgagccactgcacctggcctcccattgtctttctgtgaaggggtagatcctgccttgtttttagcacacattcaatgtccctggctttcttccagccccacccctacccaccctgctgcactgggtccatggagatatttatagtttgggggttgggggatcatcaaaattttgacactataggaaagttgaaaactcaaaaggaaaaacaatgtctgtcaaagatgcagtatccatccgggtgcggtggctcacgcctgtcatcccaggactttgggaggccgaggcaggcggatcacctgaggtcaggagttcgagaccatcctggccaacatggtgaaaccccatctctgctaaaaataaaaaaattagctgggcgtggtggcgcgcacctgtagtcccagcaactcaggaggctgaggcacaagaatcacttgtacctgggaggtggaggttgcagtgagccgggatcgcgccactgcactccagtctgggtgacaaagcaagagtccatctcaaaaaaataataaaataaaacaaaaagatccagtatccagacagaatccagagacctttccgcccatagtgtcaagatcattggcttaatcctccctgtggcctgcgtcttggccactggggttggccccatcctctggatgaggaaattgaggcagagaaggcagaaagcccagatcacgtggctatgaggaagagctggagccagactggcaccttctcctttgttaagaggctttttttttttgaggcagagtttcactctgtcgcacaggctggagtgcagtggcgcgacctcggctcactgcaacctctgcctcccaagttcaaacaactctcctgcctcagcctcccgagtagctgggattacaggtgtgcgccaccatgccaggctaatttttgcatttttagtagagatggggtttcaccatgttggtcaggctggtctaaaactcctggccccaagtgatccttccacctcggcctcccaaagtgctgggattacaggtgtgagccaccgcacctggcctttttttttttttttttagacagtctctgttgcccaggctggagtacagtggcgtgatctcagttcactgcaacctccgcctcctaggtccaagcgattcttttgcttcagcctcccaagtagctgggattacaggcatggcaccatgcctggataatttttgtatttttagtagagatggggtttcaccatgttggccaggctggtctccaactccttacctcaagtgatccgcccacctcggcctcccaaagtgctggaattacatgcgtgagccaccgcctctggcctgttaagagatttgattaagggacagcaaagcatgcctgtcctaggagtgtgggtcagaaagcatgtacctctgagcacacctgtattgcatgcatccgggacaaggtatggagggggttggacaggcaattggggccaggtggtgaatagcttagacttcacttagggccagacaggaagccactagaccctatcattgagcatgaaggccaccactgacagtaggttagcaaataggtgtggctgcatgcccataaaactttaccaaaggggccgggcatggtggctcacacctgtaatcccaacactttgggaggtcaaggcaggtggattacaaggtcaggcgttcgagaccagcctggccaacatagtgaaaccccatttctactaaaaatacaaaatattagccgggcgtggtggcgggtgtgcgtaatcccagctattccggaggctgaggcaggagaatcggttgaacctgggaggcagaggttgcaccattgtactccagcctgggcgacagtgcaagattccacctaaaaaaaaaaaaaaaagggccgggcgcggtaactcattcctgtaatcccagcactttgggaggccgaggtgggcagatcacaaggtcaggagatcgagaccatcctggctaacacggtgaaaccccatctctactaaaaatacaaaaaatcagccgggcatggtggcaggcacctgtagtcccagctactcaggaggctgaggcaggagaatggcatgaacccgggaggaggagcttgcagtgagccgagatggcgccactgcactccatcctgggcgacagagcaaggttccgtctcgaaaaaacaaacgaacgaaaaaaacacaaaaaacctttaccaaagaaggcagttggctagttggctatagtttgtcaacccctgctctctagaatattctcagcccccgtgagtttccctcatacccctcctggtcagtcccccaccagtgatacctctcctcacttcaaacatcatgcattggccaggcacagtggctcacacctgtaatcccagcactttgggaggccaaggcaggcagatcacttgaggtcaggagttcgagaccagcctgggcaacatggtgaaaccccgtctctactaaaattacaaaagattagccaggcgtggtggtgggcacctgcagtcccagctatttgggaggctgaggcatgagaattgcttgaactcgggaggcagaggttgcagtgagccgagatcgcaccactgcactccagcctgggcgactgagagagactgtctcagaaaaaaaaaaaaaaaggaccctgtctgaggcagaatgtgtgtgtgacacgcatcggtcggggagcctcgggacgttgcctctgaccgagggggaaactaaggctcctcagcacagcaatgggagcccagtttgtgcactccaacagccttgactttaaccgccccctccactttcctgctgtgctggtgggggtgggggtcaggccctggcagtgtccttaggtgcgtccacccctattctgcgacattcccttctgtcaaatctatctggagatgcagtggtagtgtcccagggggacactgcaggtgtggggatcgtccctgggaaggctgaaggtgtgagagtcagatggtggagtctcaggcagtgagggggcaggcaggggtgtccgagaccagggccctgcaggagtgccaggcagtgggcagagtactgccctgagcttccagcagcactgcatataaaccgtgggcttgctcggccccctggggtccgtgcaggccagggcaagggcaagtcccgtagcccagatgtccctcatccagccagcatcagggcttccctgggcggccgatgtggaatcagtttcagcctcagtgacccacggcagggaaacgtggacagtgctgcccgactcataagggcagagcccctgccctagcctgaaacgggtccaggcctcccacggctcttagaatccaacatgaacccctccctggcccccagaggctccgcatggcccagccgtctccctcccggcctcttccccctcccgcttcactcccactccagcctccaagctgttcctgttacaacaaatggctcctgcctcggcgcctttgcactggtagccctgctgctaaggacgctcctgttccccagctctcccccttggccggcgctcttcgcacctaggagcgtcacttcttcaagagccacccacccgccctgtccaaggttcccctgttggcctcacatcccccgcccagggcagcaccgggacctatcttgttcctggtatgtcccctgcacccagcacagagcctaaatcctcgttggctgagatgaaaactcgaaccccaggctagtgggtggcgcgggggtgtggggtcttctgcctgaccatgcacgccgcccccgcaggaggagaaggagaagcggcgcctcgaccagctggaacgtaagaaggagacgcagcgcctactggaggaggaggactccaagctcaagggcggcaaggcgccgcgggtggccacgtccagcaaggtcacccgggcccagatcgaggacacgctgcgccgagaccatcagctcagggaggccccggacacaggtcgggcggcatcccgctctggagctgcacttttgcccactgcagaggcagtggaccttgagtccattagccccctcctggcccccagagaagctgccggggctccacgtggtgcagggtgggtgggtaggccgcctcctggtaggcctggccgtgagcagacaacctcagggcttgtgccccgcggggtcctcttgtttgcagggctgccggaaagtaaggcagagaactgggcgccgggagggtgggacctgtcccaagagggcttatcagctgaagtcgcgattccatcccccctcatctctcccgccttcctcccgcccctagcttctcttgccagtctctatctcatctccttggaactgtgcatctttgcttatctctctctgtctctgtcacccacccacccgcccagccgagaaagccaagagccatctggaggtgccgctggaggagaacgtgaaccgccgcgtgctggaggagggcagcgtggaggcgcgcaccatcgaggacgccattgcagtgctcaggtaacggggcggggcctggggctttcccaggggtggagctggtcatcgggggcggggctacctgggggcggggccgggcttttcggggcaaggctgcgcccaaggccccctgacgctcatgtccacccccagcgtggcggaggaggcggccgaccggcacccagaaagacgcatgcgggcagccttcacagcctttgaggaagcccagctgccgcggctcaaacaagagaaccccaacatgcggctgtcgcagctgaaacagctgctcaagaaggagtggctccgctctcctgacaaccccatgaaccagcgggccgtgcccttcaatgcccccaagtgagcccagaacttggggagccagttcacccacgggtggtccaggtcacgactctgcacgcccttaggccaggtcagctgcgagggtcacagagcgttccgggggccaaggcgccgggccccggggccatgctcttatcaccagccacccgtcctcccgccagagggtccctgccccgagtgacaccccatcccctcccatcccccggcgcgtgtgtgtagagcctcagggctgagtgcccaataaaggtggcggcaaggctgcggtgaggcacttgaagcctaagtgagtgggtggggagaggcgggcgaagaatggggagaaggaacagctttggggacctgctgtgaaccgcactgggatcatagctagaaaagacaagagcccccaacagcgcgctccttcctgctgccagctgtgcttcatcggctcctgccagcacccctccttggctgtgccacttgtccagtgaggcacctgctccactgtctcctgcacacgcttagagaggtggaggtggaggcgctggccatacttcagaggcagagccagagaagagctggagcctgtctgccttctgagattccagttcagggtgggccctaggacttgattgggggtaccatgttgtgtttggggtcaggaaatgctggctgctctgctgttattcctacaggggaggcatctgggccaaatccttctgtgctgaatcctgggcaggcttcccagtggaggatttcttccttagtgggggatgagtcagatctcattgcagagggaggaggaaggcactgggctgggaaaggcctggaggctgcagtgagcaggtggatcggagtgggtgtgagcaagcgtcccgtcagagactgcacatctgggaagggtggagtgggatttgaacctagttctggcttcctagaacttagccagcccggaagaatagaggaagggcagctgggagatgggcctgtgaggctttgtgggctgagcaaattgcttggactcatgagggcggcaggggatggaggtgcccccagaagctgcagtggtcagggccgggtgcggtggctcattcctgtaatcccagcactttgggaggccaaggtgggcggatcacctaaggtcaggagttcgagacaagcctggccaacatggtgaaaccccgtctctactaaaaatacaaaaattagctgggtgtggtgacgcatgcttataatcccagctactggggaggctgaagcactagaaccgcttgaacccaggaggcagaggctgcagagagtcaagatcacagcactgcactccaacctgggcaacagagcaagactggcaacaacaacaaaaaaagttgcagtggtcagatcatctgcagcacttacccagtgggctcgggtagaggttggagcagcccctggtgcaagaaatggccatcaagtccccactgtgtgcctggccttggacagccctgctgtccaaggtcatccataacagtggggggaactgaggcacaagggtagagggtagggttgaaggacttaccaggccactgctgtggctcttgcccaggtgacacccacttcctatgcccatagggctgtcccctgactccccattaccctctcagctcagtacttccagcctccttactcttggcttctgagaccctccaacacagaaggcttgatccctccaccaagaacaccgtcctgctgggtgcggtggctcaggcctgtaatcccagcactttgggaggccaaggcgggtgggtcacctgagctcaggagttcgacactagcctgggaaacatggtgaaaccctatctccactaaaaatacaaaaagttagacgggcatggcggcaagtgcctgtagtcccagctactcgggaggttgaggcaggagaatcgcttgaacctgggagttggaggttgcagtgagccactgaactccagcctgggcaacagagcgagactccatctcaaaaaaaaaaaaaaaaaaatcactgtcctcccagatcacaaggcttagtgcatgcaggtccccacagaggtcctcagctctgtgtagtcagggctggagggctgggcaggctggaaggggctaggctctgcccagaggtgggagatagaatgtatcatggaggacgggactttcaggatgcataggagctctccacacagacaagggacagaaaagtcgaagaaatcacatgtgcaaaggtctggaagtcacactgcttcctgttcaacggagggtaaaaggtgccaggaataactaggtacaggtgaggcacggtggctcacacctatctataatcgcaggactttgggaggccacagtggaaggatcttttgaattcagcagtttgagaccagcctgggcaagaaagcaagactttgtctctacagaaaaagtttaaaattagggcgtgatggcatgtgcctgtggtcccaccttctttggaggccgaggtgggagaatcccttgaggttgagttagaggttgcagtgaggaggttgcagtgagccataactgtgccactgcactgcagcctgggcgacggagcgagaccccgtctctaaaaaataaactgggtacagctgaagttaacataaaaactaaccaacatatgttggacactagcttagtttggaggtcccccaagaaccaaccctgagacaatgactgtaggaaacgtgggatatctgggagagacctttggtgagggttagggaaaggagaggaaggtaaggccccctgcatcctgcagggggcaccaacgagcagagtcccccacgtgggaggagacaggcagtggcaccactgggtgccaggccttggccaaacaggtggcagcagcccctcactgagccctggggacagcccctatgagatattgatcgtctttgtatataagaaaactaaggctgggcacagtggctcacgcctgtaatcccaacactttgggaggcccaggtgggtggatcacctgaggtcgggagttcgagaccggcctgaccaacatggagaaaccccgtctctactaaaaatacaaaattagccaggcgtggtggtgcatgcctgtaatcccagctactcgggagcctgaggcaggagaatcgcttgaacccgggaggcggaggttgcagtgagccgagttcatgccactgtactccagcctgggcgacagagagagattccatctaaaaaaaaaagccgggcgtggtggcgggcgtctgtgatcccagctactctggaggctgaggcaggagagtcgcttgaacccgggaggcagagtgagccgaggccacaccatcgcactccagcctgggcaaggagagcaaaactctgtctcaaaaaaaaaaaaaaaaaaaggaaaagagaaagaaaactaagtcacctgcctgtgtcacatagccgggaagcacccagagccgccaggaaggcagcaggggtagttttggggcccagaattggggctgaagatgtcagccaggaaatgaatggaatagcccatatagctccccacaaatggaggcctgggtttgaatcccacctctgactcttctgagaccttagacaaggttctgaatgatctaagcctcagtttctccggtaaaataggactaaaaaccgcgcccaaccccaggctatctggagaatcaaggagatggtacctgggaagggtacgtggggaagggcttggcccacatgaccatattagggtctttctggctggggatgagagaaggtcggggaccaatggtaatcgatccgagggaagaagccgacgggagggccagccagacacgactgggcacacagggcctcggacgccaggcaaaggagtggggcttcaccccaggacgatggggagccccggtggggttatgagcagggcagagagccgatcagagcggcgcgtggcaggctcttccgggcgcctgcagagggacaactggtggacaagagtgaggatgaaactcaggacaggagctgagagggtggtcgtcagccctcgggcacaaagacaaggtgatgacgtttgttccctgttacagaaaggcccttactcccttcggctcctagccccggccccggccccggccccgcccccacccccgcccccgcggaatcccaggctcgcgcgtgcgcactggcagcagggaatccccagctccgccgcagagagcgggagggggcgtgagaggggagttccgtgcgcgcccagccggccccgcgtgcgttgccaggacgaccgggcggggccgcggggccgccggtcgctcactgcgcctgcgcgggggtgctcgccatttgcgccggggctttcccgtcgcgcgccagcagaagaggggatgccgcgcccagcgcgcatgcgtcggccccacccgacaccccccgccccccgcccccaacccacccaccctgagggccggggaatcctcacccgccgcagtgcgcatgggggcggggcggggaaaccggttcaaaccggagtggggtttgccgaggaggtggcgggggagggagcgagagcggggtcttcccgaggttcccactccggcccccgccgttgccttagcaaccgggcgcgcgggccgcagtgcgcgggcggcggcggcctcggggaagccgggtggctctgcgcctgcgcggggctccgcgcctgcagccggggttccccctcgagcaccggggggacggcgggggagtagaggatgggcgcgggggagcgggtgctggggaggaagagaccgtgggggaagagacggcgcgggaggaaagaaggggaggaggggtgggtgccgaggagggggcggtgggggaaaacgcaatgggtagggactgtagggaggggtgcagggagaggcgagcctggggatgcgcgccagggagggggtgacgggggagagcgtagagggagggggacgacaaaggcggagggggatgggagggggagcttagggagtagagaagggatatggacaaggagaggggtacactgggccagtgggggcgatgggagggggagctgggggacaccttaggcacctgcagtctcccgcccagcagattggtctgcgagggtgggggttgctgtgccagaaagtcaggatcttcgagtccgagcttaaggtttccagatttagaaaaaaaaaataaaaaaacagggcgcccacttaaacttgactttcagataaacgagcaattttttattataagtatgtcccattccgtgtcctctactttatcccgcagccctaatctgggctattgtcgttcccccccaccccccaatttacacaccatctgtccctatccttttcgaaagctgtgcggaccctcgcggaagacgcctttgtctcccgcctgcctagcgccccacagcccggcatgtggggtgtacccccgggccccgtcatcccctcccccagccatctgccgtcctcctggccttgaacaacagcctgaagtcgagtccgggctaggcaggggaaagcgcaaaggtgcagcacgcaccctcggggattttctcagcgctcctcaccccccacgacctccaaaccctccgctatgggcctggccctgccaaggccacatcgccccgcgggtcccagacacccgcaccttctccttctccaggaacctccagggctctgctttcgggcagcctccctcactctctgggcacaaaagcacacaggcacgtagtaggtgctcatgaaaaaaaacatttgagggtgattttagggaggcaagtgcaggtgagggagtgttgcatttctcgacacggacaactgcgtcctcatcccatggggacatataccctctctgggcctttgtcccctccaacaaagcaatttcccttttatccttccctttggtttcaaaaagtgtaagataacaaaacactttgttttgttatcaaaacacaatcaaaggggggaaaggtcagccccccaggggtccctggccctgggctgcccccagcgtctcccccaacacttccccaacttgccacgttcgcttcttttacttattcgccatcggaacggtggaacatttgcgcctccggcctggcttctgctcaaccggccaggagctcggtccctgcggatcattttccccaggggcatattattccggaaacgggctaagcggtcccgggttggggacacgtcggctcctgtgtttttagtttcgctggcctaggtgacccccctgcagaagacggctgtggatctgctgtgccgtgtcttggaggcatttctagggcggctagctgggcaaagggtggtgctgtccctttatttggagctaggtagctcctggggtggtgctgggtcgggagcggccctctcctcccatcagctaggaccaagttgcacctggcccctcattcccaggggcggagagaggagaagatgaaagagcaagcaagttcacaccagggcttgagggcagtgagaacagtaaaccagggcgacgtgcccagagaaggggcgactctagggaagaggcgaccttggatggagccctgaagagccctgtgggaacagggggtgaggagagccagggaagggcgatcccggcccaagaaaccgcagatgcaaaggctctgaggctgaaccggttagggggagaagctgggcgtgtccagaatgtggtgggcggtccagggagaccgcggagggattggaacaaagggtgggcgttgtggggggcagaccgcgtcggcctgtgaggagtcagggtgctcctcttggttcaagaagagaagggaggtggggggagggcggtcatgcgggacagggacgtgacctgtcacacgggtgaggactgaagtctgtggctgcgtcagggagaaggactgtggcggggacaggaggagccgcgggagtggggaggattttcgggctccactgggcgattgtggggtccacggggcgtgggggaatcccctgatcatgggtgtccttgtcacttctgcagcctgactctccttcactgtgtctgactaaagcatgggtcgcagccttccccaacaggggcgggaagtcccccccggggagggtgttgggtggcaccccttgtcctcggctcctgcgaacccaccggctctctgcctccacagtgcagacccgaaggcctcctcccctttgttctttttccctccacacggtcacggtcacaccggcggctccctctgagcgcatctcacacacaatgggggtggggggtgcgctcccagtttcccctcctctcagtatcggcgtccccgagccccgcccgcgccacggaatcccggcctccagaccccgcccgggaagctcgttacctttccagagaggctccccgccggggggctggggaggggggagggctatttttagaatgaatggaagaaaagagaggaaaaaaaacaaaaaacaaaaaccagaatggaggtttgtagaagcctccctgcttccaagaggaacccccctccctgtcccctgcctgaaggtggctgaaggtccccaccaaggctgaaggtgggtgggggttcagagacggggcggagcaggggacttcgaggaggaacacggtggtctgagctggagccacgctttctgttggagggggcagctgaaggagaacagcaagacatatccggcggccctacggactcggagagctggagggaccccggaggtgggcacttgtccgttcgctgaagggaaactgaggctcagaaaggggcttggcagggccgaggtcacggaaagggcttgcccctggacttctccctcccatcccctaccgagccagaccccgcgagccacattgttctaaggtggcagagtgaccttcacaactctgccacccaagcccgggccagtcaggctcaagaggttcctaatcgcgcaggttggggggagggtgtcaccagcccaacaatgaaatagagaagttttctgtggtttggttctggccacccaggctcccccttcctagctgggaccttccagcccggtcaacgtcgccagctgcccgaagcctctgggtcccccgatcctccccagtggcgtggtggggaggctttaattgtctgccttcctctctccctgactctcttctttcccggagctgagagagcggccccccagagtgaggggagcagccctgttccgtgctgctgggacactgggccctggccaggggcttccgctctccgggcctcagtttccccgtctgtaagatgagcaccttgggccagaggcggcagagggtcctcccatctctttgaccgtcttctaagatttgctgtcacgcccctgggtggaggggggagagtgggctttggcgagagacctggagggggattccatccctgctttagaggagacgccttgcgggggggagggccccggctgtggccgcgacggactgcctccctcggcctgcggggtccgcgccccctccccgggcggcggggcggggcccaggtcggcggggagggggtcggctctgcggcggcgcgcgcacaccctcccggctcacacgcccttgcccggccgtgcacttgtcttcgcgctcgggcagggcgcagggactccggctgcggcggccgactccggccggtgagtggcagtggggggcacggcggggagcgttcggtcccggcggcggtccccttctctttggtgggcggattggtcaaagcttgcccgactccgggaattcaaaggggagctgcgggaggagggggacatcccttcttcaacccccgcctccaacaccgatcccgggagtcagctcctgaccccacccccatgccctgtgaggagggggttcctgcttccaggtctggggaagcgcagacatccccctccctccgcgaggtgaaggtggggacatggggatcctccacgcctgcaccctcctcagtggtggggggaaagcaccgctggttcccgttgccccctcctccctctctgtcccctcaggtttctccctttctccttgcgttgtggcggggattccctgtgctggccaggctgcgcagtaggagggaaccccccacctgccagcctactgtgcgctgggctccgggttcctgttcttttccctaagctccctcccttcccccctcccctctcccggacaggaggaggggctgaggcccagagagggttaccactcgcccaaggtcacccagctgggctggggcagagcaggtttctggtcagatccacgaatcccgggacccagctggggaggtcagctttgggatcctctgcccccgccgccgtttaaccctgagcgtgggttgccagggccccagaactggggggattccttactttctccaagtttctcctctggctagagacccagacaggactgagccaagaagccccggcctcgctctcttccggggctcccagatctcacctcctcttgtcccccgtgtgcccccgctcccagcctcctcaggctgcccaagacctcatcaaaggaaatccctggggggagggggcttatagatggggaagtcaaagcttctggagccacggaggagataatttttactccgacgcagcaacccgctgagtgaccttggacaaggccctgccctcccaaggctagggtcagcaccaagtccccctggctggaacaggtggcccctgagccatccaaggtgaccattgccccgatcccaggtcctggtgagagaaagggcagctgggggtttccccttcagtcctgttctggggtctggcattgcccctgccctccatggggtgtccttttctgccctcttctccaggatcggacttgggtaccatgtgcttctataagccctctgcagacagcactaaatagatggagggagcacgccaagggagctacaggctcccagggcagcttcagagctggggagcaagagttcagctgctctgccaagcgaggtggttcacaactgtaatcccaacactttggaagggcgaggcaagctcaggagttcgagaccagcctgggcaacgtactgaaaccctgtctctacaaaaaattaaaaaaattagccaggtgtagtggtgcacacttgtagtccaagctacttgggggccgaaggtgggaggatcgcttgagcccgggaagtcaaggctgcagtgagccatgttcatgcgactgcactccagcctgggtgacaaaatgtcacctccctgaatgtcacccacctagatctccccatggcgaaggaactaggggcaatgtgagggggtgagcaggaacagcattgggaaagacagataaagcattcagtgtctagcttctggagcccagtgaaaggaggagtggccttagggaggggacatggaagaggtggggctagcccagggccccattggagtgataaagccactgttcttaagcttcctgaaagcttaggagatgacccagctcagcaacaccaagccagagcgcagatctgctgtaaagaccattgtacgtaataggctgaagcaggtgaatcacctctggccaggagttcaagtccagcctggccaacacagcaaaaccccatctctactaaaaatacaaaaagtagccgggcatggtggcaggcacctgtaatcccagatgcttgggaggctgaggcaggagaattgtttgaaccctggaggcggcagttgcagtgagctgagatcacatcactacactccagcctgggtgacagagcaagactctgtctcaaaaaaataaaaaataagaaagaccactgtagtccgggagctgtctgcaccctactcttttgggtccccgcctccaccccgcaccccctgtctgatcattacagatctcaaagggacaggaaaggcagcagcagccaccctctctcccagtcaagtggtcaccagcaggactgaaggggacagcccctttgcagtggctcggcgaggagacccctgcaccctagggtgagtgaatcccagacttgggtcgcctttgggggtgggggtggctcaggggttggatagaaaaattggtaactgggcaggctaggtggctcacgcctgtaatcccagcactttgggaggctgaggcaggtggatcacttgaggtcaggagtttgaggccagtttggccgacatggcgaaaccccgtgtctactaaaaatacaaaaattgcccggggatggtggtgggcacctgcaatcctagctacttgggaggctgaggcaggaggaccacttgaatccgggaggcagaggttgcagtgagccaagatcgcgccactgcactccagcctgggcgacagagcaaagctctgtttcaaaaaaaaaaaaaaaaaggtgacctgaggaaaaagtgccagcttttgaaataataacaagctgggtacagtggcgtgcacctgtggtcctagctactcggaaggctaaggtgggagtatcgagtccaggagttcgaggctgcagtgagctatgatcacgcttgtgaatggccactgcactccagcctaggcgacagagcgagacccccatctctttaattaaaaaaaaaaaaaagaaaaaaggccagacgtggtggcttacgcttgtaatcccagcactttgggaggccaaggcaggcagatcacctgaggtcaggagttcgagaccagcctggccaacagggtgaaacccccatctctactaaaaatacaaaattagccaggcatggtgctgcatgcctgtaatcccagctacttgggaggctaaggcaggagaatcacttgaacccaggaggcggaagttgcagtgagccgagattgtgccattgcactccagcctgggcaacaagagtgaaactccatctccaaaaaaaaaaaaaaaaagaaagaaagaaaaaaaataataatataattattattatatcatatatatcatgatgatgatagcaaggactatgctttctagagcctccggggagttactgtccactttctttgatcactggagttggggaaactattcagagaggccagatgacctagaagtggggtgttgagccaggttggaagagctctgtcccaccactcccgcccccgccccccacacacagcctctacttcccggctctcgtggtctcgctggagacagcccccagggtaggccagctctgtggaaggcagctcctgtgctcctttctccagtgaactttttttttttagttttgttttgttttgttttgtttgtttgttttgagacagagtctgactctgtcgcccaggctggagcgcagtggcatgatcttggctcactgcaacctccaccctccaccccaccgggttcaagcgattctcctgcttcagcctcccaagtagctgggattacaggcatgcgtcaccacgcacagctaatttttgtgttttcagtagagatggggtttccccatgttggccgggctggtctcgaactcctgacctcaggtgatccacctgtcttggcctcccaaagtgctgggattgcaggcgtgagccactgagccaggcctccttggtgaacactgactgacatccagggtcagcactaagctgcccatgggggtgtggagaaaacagaggtggtggtcatttagtcaatcaacaaacactgagcaagctagctactgtctgccaggccctaggctggatgctgggatgcaataaggacaaaggccagcccaggtcagcccttgtggaatttcatggggcatcaattaagcttaagtgttttgtgctggatacagtggctgatgcctgtgatcccagaactttgggaggccaagacaggaggatcacttgagctcaggagcttgagaccagcctgggcaatgtagcaagaacccatctctacaatttttttttttttaaattaaccagtggggtggtgcatgtgtgtggtcccagctactctggaggctgagatggggggatcacttgagcccaagaggtcgaggatacagtgggctatgattgaaccactgtactgtagtctgggtgacagtgagactctgtctcagaaagaaagcgagaaagagagaaagggggccaggtgtggtggctcatgcctgtaatcccagcactttgggaggccgaggtgggcggataatgaggtctggggatagagaccatcctgcatggtgaaaccccgtctctactaaatacaaaaaattagccaggggtgatgtcgggagtgcctgtaatcctagctactcaggaggctgaggcaggcaggagaatcgcttgaaccagggagttggaggttgcagtgagccgaaattgcagcactgcactccagcctggcgacaaagcgagactgtctcaaaaaacaaaacaaaacaaaacaaaaaaacaaaaaacagagaaagggagggagggagggacagagggagggaggaaggaaggaaggaaaggatggagggagagagagaaaaaaaggagaggagaggggaggagaggagaggggaggagaggggaggagaggagaggggaggggaggggaggggatggtggggaaggggaaagggaaagggaaaggggaaagggaaagggagaagagagagagggagggtaggagggagggagagagaaaaaaagaaggaaggaaagaaggaaggaagaaaagaaagaagaaagaggaagggagggagggaaggaagaaaattgttttgtattaggaagaaaatagaatatgaggatgtattagtgaccagaggagcagggaagcctcttgtaaaagtcagagaggcctctctagggcagtgatcatgagctgagacttgaaggaagaggaggaactggcctgctgacagctgggggaacagcatacccagcagagggaaccacatgtgcaaaggtcctgaggtgggaatgagcttggcgtgtttgaggaacagtgaggaggctgctgtggctggaacagagtgagtgggagagaggaggaagatgaaggcaagatcggcaggtaggagccaagctacaaggaactcagcggctgcagtgagggtgtggacttcagagcaatggggaaccatggcaggtgtgtgagcaggggagaggcatggtctcagttaggattttcagaagccctgtggctgctgtggagagcagggcaggagtggaggtggcaggagcccagagtggaggcccaggagatgtctggtggtttcagctgggttggtaccagggtagagcctcagatggaaaaaagtgggcacattctgggactgggttggggatggaggatgaaatgtggccaggtttccatctcatgccaagtagctactgtgagagaagggagcactcattgtgcttggggaaacctgggaaggcatcctggaggaggtgctctttgggctgagcctggaaggtcaagtagaagcttgccagcagataaggctggggtcatgtgggatctaactgctcaaatgccaggggatcactgagcacccagaatctggggcagtataatcagatttgtaaccaagaaagatccctgtaatcccagcactttgggaggccaaggtatgaggatcacttgaggacaggagttcaagaacagcctcagcaacatggcaagaccccatctctacaaaaggaaaaaaaatagctaggcatggtagcacacacgtagccccagctactcaggaggctgaggtgggaggatcacttgaggacaggagatcgaggctgcagtgagctctgactgcaccactgcactccaaactgctgcgagacaacaggagaccctgtctctttttttttttttttttttttttgatacagggtctcactctgtcatccaggctacagtgcagtgatgcaatctcagctcactgcaacctccacctcccaggctcaagtgattctcgtgccttaacctcctgggtagcttgggactatagataggtgcctgccaccgtgcccggctaatttttattttatttatttatattttcaattgtatttatttatttatttatttatttatgagacggagtcttgcctcgtcgcccaggctggagtgcagtggcgcgatctcggctcactgcaagttctgcctcccaggttcacgccactctcctgcctcagcctcccgagtagctgggactacaggcgcccgccaccacgcctggctaatttttttttgtatttttagtagagacggggtttcaccgtgttaaccaggatggtctcgatatcctgacttcgtgatccacccgcctcggcctcctaaagtgctgggattacaggcgtgagccaccacgtccagccctatttatttatttatttatttatttatttattttggagacggagtcttgctctgtcgcccaggctggagtgcaatgacgtgatctcggctcactacaacctctgcttcccaggttcaagcgattctcctgcctcctgcgtcagcctcccgagtagctgggattatacgcgtgcgccaccacacccagctaattttttgtatttttagtagagacggggtttcaccatgttggccacgctggtcttgttttttgttttgttttgttttgttttttttgagacagagtctcgctctgtcgcccaggctggaatgcaatggtgcgttctcagctcactgcaacctccgcctcctaggttcaagtgattctctgcctcaggctcctgagtagctgggattacaggcacctgccaccacgcctggctaatttttgtatttttaatagagacggggtttcaccatgttggccaggctggtcttgaactcctgacctcatgatccacccacctcggcctcccaaagtgctgggattacaggtgtgagccaccgcacccggttatattttttcaatttattctttattttagtagagacagggtttcatcatgttgcccaggctggtcttgaatccctgagctcaggcaatcagcccaacttggcttcccaaagtgctaggattacaggcatgagccatgggaccctgtctcttaaaaataaaaaaatgattccctctaggtggggggctctgggggaggttacacccgagtgaaagagttcaagaggtgcttttgaaatagtccaggtcagctggacgcggtggctcaggcctataatcctagcactttgggaggctgaggtgggcggatcacgaggtcgggagtttgagaccagcctggccatcatggtgaaaccccgtctctactaaaaatacaaaaattagccgagcgtgatggtgggcacctgtaatcccagctactcaggaggctgagacaggagaatcacttgaacccaggaggtggaggttgcagtaagcggagactgtgccactgcactccagcctgggcaacagagtgagactccatctcaaaaaaactaaaccaaacaaaaaaacaaaaaaaaaaaagaaaaagaaatagttcaggtaatggtcaggccagttgcagctgtaagcattcatggagcactagtgctgaacctcatgccactggcctccaatgaggccatatcattgccttgcagaggaaatggaggcctagagttacaagtcccttgtccacaatcactgccttcattcctgtggctgccaccacaaatgaccatgagctggatgacttacaaccacacaaagttggccaggcggggtggctcacggctgtaatcctagcactttgggaggccgaggcgggtggatcacctgaggtcaggagttcgagaccagcctggccaacatggtgaaaccctgtctttactaaagatacaaaaattagccaggcgtggtggtgggtgcctataatcccagctactcgggaggctgaggcaggagaatcgcttgaacgtgggaggcggaggttgcagagagccaggatctcaccactgcactccagcctgggtgacaggagcgaaactctgtctcaaaaaaaagaaaagaaaagaaaagaaaaacacacaaaaagttgtgctgtcacagttctagaggccagaagtccaaaatcaaggtgttggtggtgttgccttccctccggaggctctcaggaggatcctttcctgcctcttccagcctctggtggctcctggtgttctttggctgtgtcacccccacctctgtctctgttttcacatgaccttctccctgtttgtccatctgtatcctcatatgggcttcgtattaaaaaaaacagttgttagatcagagcccaccctaatctaccatgagcccctcttcattgggtgggccaaagcaggtagatcacttgaggccaggagttggagaccaacctggtcaacatggtgaaaccccgtctctattaaaaatataaaaattagccggctgtggtggtgcgcgtctgtaatctcagctactcaggaggctgaggcaggagaattgcgtgaacccaggaggcggaggttgcagtgagccgagatcacaccactgcactccagcctgggcaacagagtgagactctgactcaaaaaaaaaaaaaaaaaaaaacccagaaaccagttattagatcagagccagaactaacccactatgaccccctcttcatttaactacatctgcaaaaaccttgtttccaggccaggcacagtggttcacgcttataatcccagcactttgggaggctgagatgggagcctcacttgagcccaggaatatgagagcagcctgggcaacataatgagacctcgtctctacatttaaaaacaaaaagaaaagaaaaagaaacaggagaatctcttaagcccaagagatagaggctgcaatgggcgtgatcgtgccactgcactccagtgtgggtgagagagtgagacccagcttcaaaaacaaaagaaacaaaaccctattttctttctttctttctttctttctttttttttttttgagacggagtcttgctttgttgcccaggctggagtgcaatggcacaatcttggctcactgcaacctctgcctcccaggttcaagcagttctcctgcctcagcaccccctagtagctgagattacaggcgcgtgctaccatgctcagctaagttttatatttttagtagaaacagggtttcaccatattggctaggctggtcctggtctctaattcctgacctcaggtgatccacccgcctcggcctcccaaagtgctgggattacaggcatgagccactgagcctggccaaaaaaacccctattttcaaataaggtccaaggttctggggaggactcaaattttggggggtcacgattcaaaccagtccacctgcgtagcaagacattggggtttggagtcaaacctttgctcctctatggagctgccacagtggggagagaggggttccctggagcaaatttatgggatcggttggacccactggatgtgggggtggtaaaggaaggaggctagagccttctagcctgagcgtgaggagggaggggcgctcatgtctgaatggacaggatgggacagtcccagggtggggccgctggtgggcatgacaggggctccctgacagccttggatgctttttggggactccttgcttatgatggagctgctaccctgcctgcctgtcacgcccaggctcccacttcctgctctagggctgagaacacagcaggcagcccatggggagaaccgggaaggatcaggcccagtccctcccctcccatcctgtgcccctttttcctccgtgttctgtctgcagggcccttgtgtatttatcatatcaaagccggtcttgtcttctggcctgaaactgggagtctgggggactttgtgtgtctttaccaccacagtgtccctgccttagagtacaagtcctgcacacaggaggtgctcagtagatgctgatggaaggaatcccaggtccctgaatcccgagagctcaggaacaagccctctgcgacacctgccccagctcccaccctggtattcccactccgcttcctgcccctgcagttcccaggagcccgagggagccaacactccagatcttgttttttttttttctttttgagatggtgtcttgcactgtcacccaggctggagtgcagtggcgtgacctcggctcactgcaacctctgccttctgggttcaagcgatcttctgcctcagcctcccgagtaggtgggattacagcgccaccacgcctggctaattttttgtatttttagtagagatggggtttcactatgttggccaggctggtcttgaactcctgacctcatgatccgcctgtcttggcctcccaaagtgctgggattacaggcgtgagccaccacgcccaggctttttttttttttttttttttttgagacggagtcttgctctgtcaagcccaggctggagtgcagtggcgcgatctcggttcactgcaagctccgcctcctgggttcacgccattctcctgcctcagccgccagagtagttgggattacaggcgcccgccaccacgccacacccggctaagttttttgtatttttagtaaagacggggtttcaccgtgttagccaggatggtctcgatctcctgacctcgtgatccgcctgcctcagcctcccaaagtgctgagattgcaggagtgagccactgcacccggccacctttttttttttttttgagatagagtctcactctgtcgcccaggctgtagtgcagtggcacagtcttggctcactgcaacctccacctcccaagttcaagcgattctcctgcctctcagcctcccaagtagctgggattacagttgcccaccaacacacccggctaattttttgtatttttggtagagacagggttttgccatgttggccaggttggtctcgaactcctgacctcaggtgatctgccctctttgtcctcccgaagtgctgagattataggcatgagccaccacacccagctcaaatgatttctcttctaagagacttccctgaccaccctaactcaagtctccctgtcctcgttcttagttctttcaacttttttggatctcttcctgatacttctgatacttttttttttttttttgtgagatagggtcttgctttgttgcccaggctggagggcagaggcatgatcacagctcactgtggtctccacctcctgggctcgagcgatcttcctgcctcagccgcccgaaggagctgggactacgggcacatggctccacgcctagctaatttttaaaaaatttttgtagagacagggtctcgctatgttgcctaggctggacagtacttttgtgtatctaaaattctcagttttatttccctctttggagagggttgtccccctcttctagaaagccagcttcaagaggggcacggtttgtatctctctagggtgctgcattccccagcaccaggctcagagaaggggctatgtggatatgtgaatgaatgaatgaattagtgaatgaatgaatgaatcagtgaataaataaatggctgaatgagtgaatatcttacccttgccatcctgacactcactggggcccaggttccagcttccatccgggcagtccgggctgggtccaagatttcagtggatgcacctgtggaggggtgctggggatggaggtgtagggagatgctcgtgtggccaggccactccctgctccggccactacctttgtgtccctgagctcctgtgaacgtcttccagttctcttgcacccagacccttagacactgcccagagaccagaggcccagccctcaggccccctgcggaggggcttgctctccagccgcctccaccatgcttgacgtttgcagaggacacagcctgtgcgcaaggcagtttcccagggcatgagtcccgggggcgtcttggctgcctgacaggctcacttgcaggcttcttgggtctcttccagccaaccatgggctgatgagaggctctgcctggaacggagacccagacagcccccaccagaagtcccacctccatccaaccttgactcccattcatgctgccaaccttgtctctgaggggtgggattccagcaggtggcaggactgactcaggtgggaggcaaggccgttgatcaccagattgattgtccaagttccacttcttgatgggggcagtccccgatccctcagggcaggtgaatgcaaaggagaacaagcacaggtcttttcagagggagaaggtgggtacaggggcttcagggcgtgggcaggggtgcaggggattgggggcagtggagtgctgtggctgatgtttttgtgaatttcgggacagttacatgttagacttgaattcaaaaagcatctggccaggcgcggtggctcacgcctgtaatcccagcactttgggagtggatcgcttgaggttaggagttcgagaccagcctggccaacatggtgaaaccccgtctctactaaaattacaaaaattagccaggtttggtggtgcacgcctgtaatcccagctacattggaaggcggaggcatgagaattgcttgaacccaggaggtggaggtttagaggttgcaatgagtggagatcgtgctgctgcactccagcctgggcgacaaagtgagactctgtctcaaaaaaaaaaaaagaaagaaaaaagcatctgatgctacagcctgtgcaagcagaccagggtcagcccgtgggcatggtatgcttctcgtggctcagggactcctgcaagggctgggttgagctgtcaggggccaggagcattgaatgtggttcagggatgtgcccaatcctgagggagctgtgggtggctccaatgttgtgctttagaaaggggggctcctggtggtccaggcaggggaacagcaagtgcaaaggcctggaggtgggaactgtggcgaggggagactgagaaggcttggctggaggttggagtgctggtgagtcagtggagagatgcaagaggggtggctggttctcaggtgtggctgaaaacccgccccttcggagtccccacaacccctttcttgctctgcagtgactctcaaagctgcttgtgtctggtcagatcactcgtaacagccccctgttacagatcctatccaaccccgcctggtacctctgtggatctgaccgggaccacccaggcctctatttcctgattgtctcagccctgggcattgtcaccacggccgggccttgtgcagagcagtctggacaggctgggatgaggaacgggctctccaggggagggaacaaaggtcctgtctgagactctgagccatcacctggcccctctgtgactcaccgccaccctcagcccatgcagctatccctcattcatgcctgcctgcctgcctgcctgcctgcctgccttccttccttccttccttccttccttccttccttccttccttccttccttccttccttcagtccaactgttttctgagctccgcagaggaaacacagaagacagcctccctcaggaataaacactcagatgttcctgacctgggccaaagctctgggctgggaagaaaacagatggagggtgtgggagagagataggaggtgggatctgctggctccaggaagcccccaggctggtgggggacagagctgaacacagtcaccccaagcctggtgggaacagggtgaggcagaggcagaggcagtaagactggaagaggaggaaggaagagctccctacccactggtccccaaagctccctggagccgccattaactttgaatgaatgagtcggccaagttcagcctgggtgctgggggaaggagcacagttttggggacccccagccctggtgatcccaaactccctggggctctggcttcctgtcatcctggaaatgggtgttggaggttaggactgggtggcctgatccagacgggcgtctctcctcccacagaaggtggcctctaaccgagtgccccagcatgtacccagtcccacccctggaaggccctacacctggctcccagacaccccccaacttgcaatcaccctagtccccctcaaggctcccctatgcagagctagaccccggaggaggtcgtttgaggggcaggcattgagttgctttgcaaagttgtctttcagctgatgcttacggggaggacagtccccaggcgtgcaaaggttgacagagcggctgaagtttgggacctaattttggggagggggtatagttaggaggtccggagggctgttgggggcgggggttggagcttcaccaaggtccttcccgtcttatggggcaagagggggagttcgaagaccagccgcatgccggggggttgcagggggcgccggggaatgtgggatctttaaatatgggcggggcttgcggggtcgtcgaaggcggtgccaacccgggctcggccaatcggcggcggctcccgcgtcgcaccgcccccttctctcccggcccgggcgggcgctcgccccccgccgggcccgtggactgggcggcgggggatgcgcctgccgccgccgcccccggccccgccgcccccgggccccgcgcccgctcgctgctgcccgccccgtccgcgaccccggctccggctcccgactgggggtccgcggccgcgcgggaccctctcccctccagccttgtccgcccgctcgggccgagccccgcaggtacagggtgggatgggtgagggtgcgggaggatccaggatctgcagctcagggagcccgaggagggaggcacgtctcggagggggacgcggtttggggcaggggccaagagggagggtctccgtgcggtccggagcctaggagacacaggaaaggtggggggaatgaatgcatgtacattgcccgagtgagtgaggatccacgcacccccatcctgggagggggagggtgcagggttcactttgggggagggcagagctgtgagtctccaaactgcatagatagggttggaggtcggggagctctcagggatggacagtgacccgcaatgacttgggaatgggagggaggtgacccaccactggcccctggatccaggggttggggcactcagggaggggtcaggaaaccgggtcttccatctctccccggacagaagtcccggacccagctcggggcactgcccctgctgttctggagggctggccagcagatgggagttcccgaggctggggtctgagcggtgaggctgatggagatgcatcagaatggagggcccccgagggaggcagcctccaggagagcaggctaattgcaccctgctggctgctggcaggctcctggcgggtggtgatggggggatcgggcgggtagccagcgccttgctgcactggctcctgggcggcccatgggacgggagggcaggcagtgtctgtctgccctgcagagctagggccctgtgattattgggggaggggaggggaagggaggggtgggggtggtggcgggaagggggatcctcggagaccttcctcaacctcagcagggacacccggactctggctgcgcccgctggggacccacaacaggcccacatgtcccagaagtttctgctgtgtgctgatctggttgtggtacccggaagcccctgggtgtgcatctggggagcaggggcggtctgccttggggattgaggggcagggagcaccttctcttggtccagttctgaagaacagaaatcaatggcatgaagctcttacagactgcaaagcatttgccatgcgagatcttactctgttctggacaccaaccctcgtagtgggggggtgggggggaggcaccatgaggaatctttacaaagcaggtggccaaggagtgggcagtaacttgctccctggcaggggtacctagggccccttctcagtggctgcctcaaccaacctgtcatttgtaaaaatgctcgctggagggccctgggggcctgactgggattctgtctcttcccatgtcctgttgggtggggaatctaaggagccatcagccctgctccctgctaccctcatcctctcctcaagagctctcatgggtccccccaggcacacgaggttcccccagaagtgtgtgtctccagggagggtgtggaagtgggtctctgctcatcccctgcaccccaggcttcagggaagggagctctcatgaccagacagagtagtaaaagtaaggcaatatcaaagaccttccaacccaaatacaccccgtaggatgtttgttgtttgttagagatgggatattgctagttgtccaggctggtctcgagctcctgggctgaagtgatctcctgccttggcctcttgaatagctggaactaggtatatacctagctaatagggtggtattcctcacttggcaaacccagggctgttacccagaaaaacataccctttcatgggcatccaaaccttggctgagggttcccaggggctcctgggtctctgggaatccctgagggtcccagggactccagtgttaggcccagattgcagtgggggaggggatgtgtacccaggaatggggaaggcccaggcactcatcagttctgtgctccaagctagtggcttctcgacggcaggaccaggccagttcccctcccagaaagcagaccctgccacctgccacgcctggatggcactaatttagtccctgcctttcctggctgggtgaccttgggcaaaaggtgctgagcttctctgagctctgtctcccgtctgtaaaatgggaacgggaatgccaccttgctcaccggtggtgatagggattaaatgtgatcaccctgatctcaggctcaaagcatagtaagagcccggtccacagtaatgtggtgggtgccgggaaagccctccacccctccacccctccaccctcttggaagccacctgccatttctctcctcctccccaccccctccctgcccagggcaccttaggacgcggctgccaggcgaggaggaacatggcagacacacggctgaatttggcccatgcgtcgggtggctgagtcacatccccaaattgcatcttcattggtgcgtttcggaaggtcgtttgcagaggccatcggaggcctacaccccctctgggttctgtctgccaggccacccgcttctcatccctgtgccccccatccccagctggggaagttttgcaccctcggggatggtggaaggggtgcctgggttttcctgggccccctggaggagggcaggatctggggttcctgtgtgcaccctagtgcaagctcccagccccacctggtagccagcggatgttcaggcagtgggcaggggtttgagcctcggagcagaaggcccacctaagtatttgtgaggttacggaaagatcagggccaaggtcagcctcataaactgtcaaatgctgggcccacaaggccaggccttatagactgtgaagtgctgggccggcaggaggtcaggcctgataaactgggaagtactaggccacatgaggctaggtctcataaactgggaagtgctgggcctgcgggaggtcaggccttacaagctgtgaggtgcctggtcacaggaagccacagcctgattgatgtgatgggtgagggtgggaaggggtgggacaagttctgagactcatgaggtcacctgaccatagaaggaatgatttttttttttttttttttttttttttttttttttttttttttttggagacagggtctcactctgttatccaggctggaatgcagtggcatgatctcagctcactgcaacctccacttcccgggttcaagtgattcttgtgcctcagcctcccaagtagctgggatgacaggtgcccactaccacgcccggctaattttgtatttttagtagagacagggtttcactatgttggccaggctggtcttgaactcttgacttcaggtgatccacccaccttggcctcccagagtgctgggattacaggtgtgagccaccacgcccagccagttttgccatgttggccaagctggtcttgaactcctgacctcaagtgatctacccgcctcagcctcccaaagtgctggaattacaggcatgagctaccgcgcccggccacaaagaaataattcttgcactcctgtgtgctgacaccagtatctggagacacatcgtgagggacagacacagtgtggggggtgccggacaaaggcataggtggtcctgcaatgtgtgcggcagccaaagtcacccatgtccaactcagcagtgtagctcatttttttttttttttgagacagagtctcactctgttgcccaggctggagtgcagtggcgtgatctcagctcactgcagcctccacctcccgagttcaagctattctcctgcctcagcctcccaagtagctgggattacaggtgcccaccaccacacctggctaatttttgtagttttagtagagacaggatttcgccatgttggccaggctggcctcaaactcctgacctcaagtgatctgcccacctcagcctcccaaagtgctgggattacaggcgtgagccactgcacccagccaatgtggctcatcttgctgtgtcctggaatgacgatctgctagtctgtcacccccagtgggggtgggaagtgtcctgcctgtgcacacagctgcccccaacccttctcccaggcctggcacatgggggacccctagtgcatgctgttgtgaccatttcaaaggggataacacttggcctccacccacccctgcccagcttgttgggaaaatctcacaaaggagccgggtccggaatcttccctgcaaggagaaggtgtgtcttcaggcaggtttgtattattattattttttttttgagacggagttttgctcttgttgcccaggctggagtgcaatggcatgatctcagctcactgcaacctccgcctcccgggttcaagcgattctcctgtctcaacctcctgagtaggtgggattacaggcatgggccaccacgcccagctaattttttgtctttttagtagagacggggtttcaccatgttggtcaggctggtctcgaactcctgacctcagatgatctgcccaccttggcctcccaaagtgctgggattccaggcgtgagccaccgtgcccggcccaggcagattctttcacaacatcatgccacagtttccccatctgtaaaactggccaaatcccaggacccacttcttggcagtattaggattcaggagaacatttacataaagaatggagcctgggaccgggcacagtggctcatgcctgtaatcccaacactttgggaggacgaggaggaaggatcactggagcccaggagttccagaccagcctgggcaatgtagcaaggcctgatctctactagaaataaaaataaatcatctatggccataccaccctgaacactcccgatctcatctgatctcggaaaaataaatcattagctgggggtggtggcgcatacctgtagtccttgctgcttgggaggctgaggtgggaggatcgcttgagcccaggagtccgaggctgcagtgagctaggattgccccactgcactccagcctgggctacagagcaggcaaggagtgcatttgagggtctgagatactgggctgggcagggcaggggagaatctgacaagttggatccagagtctcagacagcctctcaatgccttggtgagcatgatgactatgtcaccatcattgaggtccctgctctcacacatgatgccacaggacattgctctgtaatcacacagggtgcttttcaaatagcctggcagggaaacaggctagcctgagatcatagagcccagccaagcatgtcttatgtcttacaaagccctgcagaatcgattctagatcttggagttaaagcctgcattgccacactgtttggagatcatggatcccctcctggaaaccatttggattctgtttggaatctgtttggagattatggatcccctcctgcccaggcaggagggagcctcaggatctctgtagccacagccagggtccctaatgtcccataggccacagtgcaggagcctacaaatgcaggaggcacggtgaggtgaggttaactcatccaagagtctgaaggttggaagaggatgagctcagatgaaaaccaccttctaagcataccattagccaccctctcctcccaggcaagcccgttggtagatttcatcttccagcgttcagcaagtgtttcctgagtgtcatctgtttgctaggcattgttctaggtgcttggatacacataaagtcagcaggcagggctctggtaggggggcattccaggcagagggcacagcctgtgcaaggtatcagagaaggatgaacttgttggaatctggtgattgggagaccattgtggctggaggaattgggtctggggagagtaagaaggacgagataggtgggaaccagatacagagggccccttggccatagtgaagagtttggtgttttatttgtttttgtttttgttttttttagagatcggctctagttatgttgtccaggctggatttaaacccccagactcaagtgatcctccagtctcagcctctgagtagctgtgattacaagtgtgcaccactgggcccagctctggagtttctttgttctttttcttttttttgagacgtagtctcactctgccacccaggctggagtgcaatggcatgatcttggctcactacagcctctgcttcctgggttcaagcgattcttctgcctcagcctcccacgcagctgggactacaggcatgcaccactacgcctggctaatttttgtatttttagtagagactggttttcgccatgttggccaggccagtttcgaactcctgaactcaagcggtccttctgccttggcctcctaagtagctgcaattaccagagctgcaccaccatgcccggctctctggggttgattttttcagtgagatggcactggggagccatggcagggctttgagcaggggagggattcaggctgactcagatgtttctgggatggtaaacccacgtgtcagcactctgggccactcccaaacttagaacgttctgggttggccgggatggtccttgcctttctggtcagtaagctggaccctgctgtgaccatgtccctctgtgcccttgcaggtcagtgcaggagcccagccgctgagccatgccgggccccgggcggcctgcagcgagcccaacccctgcacccaggtagtcatgaacagccacagctacaatggcagcgtggggcggccgctgggcagcgggccgggcgccctgggacgagaccctccggaccctgaggccggccaccccccacaacccccgcacagcccgggcctccaggtggtagtggccaagagtgagccagcccggccctcacccggcagcccccgggggcagccccaggaccaggacgatgacgaggatgatgaggaagatgaggccggcaggcagagagcctcggggaaaccctcaaatgtgggccaccgcctgggccaccggcgggcgctcttcgagaagcggaagcgcctcagcgactatgccctcattttcggcatgtttggcatcgtcgtcatggtgacggagaccgagctgtcctggggggtgtacaccaaggtaggcgtggtcctcccccaggcactccagggaggttccaccaagcccgcctagctttcttgacatggggttgggggtggcagggccccccgggagatagggagtgttagggggctcccggaggtgagggctccctggccttctgcatacccacctccaggaaggtagcagggaggctacacatggagaaggaaggttccagcccattccctggccaggtgtcaaggggctgcaccctggcttaaggcggaggggggcttccccccaggacaggggttccccagagtgggcctgctctggggagcaacagaagatcttcctccccttccgagagtgagtgcgtccaggttacaagcctggctgtgggttccctcatgccacctagaatgtgtgaggatggagagagatcagggctgtgtcagcctgtaaactctgaagtgccgaggctggatgaggtccggccttgtgaactgtgaagtgctgtgcccaagtgaggccaggcctcataaactgtgaagcactggacacatcttgctgtcagcccagtccccaggaataaggacaggagagcaccgcttcctgaatacagcacatgctgcacgcccagccctgataagctgtttcacacacagcagccccaggactggggaactagcagaaattcagggtacagtgggagaagccactgggaagagccccatttagctgactcccatgcccgggagccagggtaaggggatgggagggccgccggcccaccgcctccagcgtccatctggctgtgtcctctctctttaccaggagtctctgtactcattcgcactcaaatgcctcatcagcctctccacggccatcctgctgggtctcgttgtcctctaccatgcccgggagatccaggtcagtgctgaatactgcaggaagcagctcctctcctcaaaccccagatccccccacaccagcccaccttagaccccatcccctcaaaacataaaaggatgtataattggcttctgatagaaaaaagatctccataaagacacacagtttccatcattctagatttccttgaaacacacatctgtgttttaattttcattgattatttacaaaaaagaacaggtagtgagaaagtgaggggctgagctgggactctgggacacacgggttgtttccaggctggagtgcagtggtgcgatattggctcgctgcaacctctgcctcctgggttcaagcgattcttctgcctcagtctcccgagtagctgggattacaggcgcatggcaccacaccttgctaatttttgtatttctagtagagacgggatttcaccatgttggccaggctggtctcgaactcctgacctccagtgatccacccgtctcagcctcccaaagtgctaggattacaggtgtcagccactgctcctggcctatttgtttagtttttgagacagggtctcactctgttgcccaggctggagtgcagtgatgcagtcatggctttgacctcttgtgttcaagagattttcctgccacagcctcccgagtagctgggactacagctgcgcaccaccacacctggctaatttttgtattgtcttgtcagtgtctcgccatattgcccaggctggcctcaaactcgtgggctcaagtgatcggcccacctcaccctcccaaagtgttgggactttacaggcatgagccaccatgcccggctgcacacgcatgttgataacagcactgttcaaagtagccaaaaatcacacctgtgatcccagcactttgggaggccaaggcgggtggatcacttggggtcaggagttcaagaccagcttggtcaacgtggtgaaactccatctctacaaaaattagccaggcatgatatcgggtgcacgtaatcccagctatttgggaggctgaggcgggagaatcacttgaacctgggaggcagaggttgcagtggagctgagatcgaaccattgcactccagcctgggcaacagagcaagactccgtctcaaaaaaacaaaaatacaaagtagccaaaaagcagaaacaacatccaaatgtccatccaggcatgaatggataaataaaatgtagtgcacctgtacaatggacaattattcaacctttttttttttttgagacggagtttcactgttgttgtccaggctggagtgcaatggcacgatctccagctcaccgcaacctacgcctcctgggttcaagcaattctcctgcttcagcctcccgagcagctgggattacaggcatgtgccaccacacccagctaattttgtatttttagtagagacggggtttctccatgttggtcagggtggtctcgaactcccaacctcaggtgatctgcccgcctcggcctcccaaggtgctgggattacaggtgtgagccaccgcgcccagcataacctttttttttttgagatggagtctcactctgttgcccaggctggagtgcagtggcgcgatcttggctcactgcaacctccgcctcccaggttcaagtgattctcctgcctcagtctcctgagtggctgggattacaggtgcccgccaccacgcctggctaatttttgtatttttagtacagatggggtttcaccatattggccaggctggtctcgaactcctgacctcagggtgatcctcccaccttggcctcccaaagtgctgggattacaagcgtgagccaccatgcctggcctattcaaccttaacaaaagaacgaaacaccaaaacagcagaaatgtattgtctgaaagtctggagtatagaagtctgagatcaaggcgttagcagggttggttccttctgagagccatgagagacaatccgtcccaggcctctctcctagcttttggttgctgctggcaattttgggggttctcagcttaggagatgtgtcactccaatctctgccttgaggatcacatgatgttctccctttgagagtgtctgtgtccaaatttcccctttttaaaataagaacaccagtcattattggattagggcccactgcaattagatgattccacttttttttttttgagacagagtttcactctgtcacccacactggaatgccgtggcttgatcacagatcactgcagcctcgacatcctgggcttacacagtcctcccacctcagcccccaggtagctgggattacaagcacttgccaccatgcccagctaatttttaaattttttgctttttttgtagaaagggggtcttaccatgttggccaggctggtcttgaactcctgggctgaagcgatcctcccacttcagcctcccaaagtgctgagatttcaggcgtgagccactatgcctggcctgattccagcttaacttcattttaactagccgacctcgttacaatgacctcatttaacgagatgacctctataaagaccttatctccatataagagcacattcagaggtactagaggtcaggatgccaacatatctttttcagcagaacacaaatcaacctataacaatttctgatactgaacatggatgaacctcagaaatacgacgctcagcagaagaacccagacataaaaggccacaaattgcatgcttccatttatgtgaaattttcagaagatgcaaatccgcagagacagaaaggagattagtggttgccgggggctgggaaaggagcgactgctaatggggacagggctcccttttggggtgatggaagtgttctgaaattagatagaagaggtgtactaaatcccactgaattgtgcactttaaatgggagaattatacggtttgtgaatttcatatatgtatacttgttttttttttttttttttgagatggcgtcttgctctgtcacccaggctggagtacagtggtgcaatctcagctcattgcaacctccgcctcctgggttcaagtcattctcctgcctcagcctcctgagtagctgggattacaggtacctgccaccacacctggccaatttttgtatttttcgtagagatggggtttcaccatgttggccaggctggtcttgaactcctgacctcgtgttccacccgcctcggccttccaaagtgctgggattacaggcatgagccactgcccagcctgttttttttttttttttttttaaacacaggatctcgttctgtcgcccaggctggagtacagtggtgcagtcagagttcactgcagcttgtacctcctgggatcaaggagtcctgcctcagccttccaagtagctgggaccacaggcacagaccgccatgcccagctaaatgtaaaaccttatatatacagatatataaaaccatacatatataaagacaggattttcctatgttgcccaggctggtctcaaactcctgggctagagtgatcctcctgcctcagcctcctaaagtgttgggattataggtgtgagccacagacccggcttttttttttaactgtaattcaggctggacacagtgactcacgcctgtaatcccaatactttggaaggccgaggcaggaggatcactcgagcacaggagttcgagatcagcctgggcaacgtggcgaaacaccgtctctacacaaaaattttttaaacagttagccaggcatggtggtacacatctgtagttccagctacttgggaggttgaggtgggaggatcacctgagcccagggaggtcaaggctgcagtgagccatgatggcgccactgcacaccagcctgggggacagaatgagactccctctcaaaacaaaaaacaaaacaaaacaaacaaacaacaaaatggaggcagtatggacagtaacatagcaagaccccttcctcttaaaaaaaaaaaaaaaaaaaggccgggctcacgactgtaatcccagcactttgggaggccgaggtgggcggatcacgaggtcaggagatggagaccatcctggctaacacggtgaaaccccgtctctactaaaaatacaaaacattagccaggcgtggtggcgggcgcctgtagtcccagctactcgggaggctgaggcaggagaatggcgtgaacccgggagtaggagcttgcagtgagccgagatcgcgtcactgcactccagcctgggcaatggagcgagactccgtctcaaaaaaaaaaaaaaaaaaaaaaggaaggagttagaggctccagtaagcagtaagctatgatcccgccagagcaggacccggtctcaaaaatagggtggggggtgggggagggggcgtggctgcattcctgatgataccttttgcctccagctccaatatgattggtcccggctccgtaactgacagatgttatgtatcttggcgctcccctcatctcccctaggactggccctggatatggccagggtaccccatggagggtgagcaatggcgctgtagggtgtcctttatgtcaacgctttgccgatgtgcgagcggaggaggcccctagaacgcgcggccgccacattttaaggaagtgacttttttttctttttcttattttagaatgactttattgcttcttatttttaaaatgacacgtgaaaaaggaaaaaaaaagatacttaagagttatacacacgttcagaaggaagagaaaagtacagtgaagggctgggcacccacacctggaatctcagcactttgggaggctgaggagggaggactgctggagcccaggagttcaaagccagcctgggcaacagagcgagtccccatctctgcattaattttctttttctttttctttctttttttttttttatcgagacaagagtctcactctgttgcccaggctggagtgcagtggcgcaatcttggctcactgcaacctctgcctcccaggttcaaatgattcttgtgcgtcagcctctcaaggctgagattacaggcacccgccaccacacctagctaatttttttttttttttttttttttttttttttgtatttttagtagagacggggttttgccatgttgcctgggctggtctcaaactgctggcctcaagcagtcctcctgcctcccaaagcactgggattacaggcaggagccactgcacccattctgtttccacttttggaggttgtgaatagtgccgttgtgaatgtgtctgtccaagcgtttgcttaaacacttgttttagtttctcttgagtctgtctaggagtgggattgctgggtcattagtaactctatgttgaactttttggggaacactcatatttcgttcgaactgtggccagtgctgagaactagagagttttgcatacgaggtcacgtttctgacttctcttggaaaaatttgaagctggtgcggttgctcacacctgtgattccagcactctgggaggctgaggcaggaggacacttgaggccaggagttttagaccagcctgggcaaaatagggagaccccatctctacaggaaatttaaaaaattagccaggcatggtgttgcatgcctgtaatcccagctcctcaggaggagactgaggcaggaggatcacttgagcccaggaggtcaagactgcagtgagctgtgattgcaccactgcactccagcccgggcacagagcaagaccttgtctccaaaaaaaggaaaaagaaaagaaaaatcctcgccaggcacagtggctcacacgtgtaatcccagcactttgggaggccgaggcatgtggatcacttgaagtcaggagtttgagaccagcctggccaacatggtgaaaccccgtatctactaaaaatacaaaaattagccaggcatggtggcaggcacctgtaatcccagctactcgggaggctgaggcaggagaattgcttgaacccgggaggcagaggttgccaagatcgtcttcatggtgcatgagccaagtgaaccaggattgcgccactgcactacagcctgtgcgacagagtgagaccctgtctcaagaaaaagaaaaagaaagaaaagaggctgggcatggtggcttacgcctgtaatccctgcactttgggaggccgaggtgggcagatcacctgaggtcaggaattcgagactagcctggccaacatgatgaaaccccatctctactaaaaatacaaaaattagccaggtgtggtggggcaagcctgtaattccagctactccggaggctgaggcaagagaattgctttcacccaggaggcggagattgcagtgagcagagatcgtgccactgcactccagcctgggcgataagagcaaaactccatctcaaaaaaaaaaaaaaaagaaagaaagaaagaaagaaaaatccgagcctgtggggtttcaggccaggctgacgtcactctctgggggcgcggtggggctgggcagggagcgcggcgcgtgtctgacacccatggctggttccctcccgccctccacagctgttcatggtggacaacggggctgatgactggcgcatcgccatgacctgcgagcgcgtgttcctcatctcgctagagctggcagtgtgcgccattcacccggtgcccggccactaccgcttcacgtggacggcgcggctggccttcacgtacgcgccctcggtggccgaggccgacgtggacgtgctgctgtccatccccatgttcctgcgcctctacctgctgggccgggtgatgctactgcacagcaaaatcttcacggacgcctcgagccgcagcatcggggccctcaacaagatcaccttcaacacgcgcttcgtcatgaagacactcatgaccatctgccccggcaccgtgctgctggtcttcagcatctcctcctggatcatcgcagcctggaccgtgcgcgtctgcgagaggtgcgaccgccgcccctggagcccccccagcccccagcccccgtctccctggacctccatgcccattcatgatttcaccgaccctgggcccctcccgaccctggccattgcttctgtctccccgactgcaagacacccgtggtgcctcctgtcttccagtttgtggcttcagtaatcatcctccctggggacctaaccctgtgtccccagctgccctcaaccagggagggaccccagctccctctccctcatcctccctgccagggtctcccaagcttccttctcccagcccctcggctccctgggaggctgactcccgatctctggccccggggggcgcaggcagcaggcacagggatgcctccccgtcccctctgtctcccatctcccacgtttaaccagctttcattttcccctctgcccgctccactggactttagggaaaacatgtgagtcccaccctccgctgagctgtgtgcgcagagcagccactgccaccgctgccgccatccccgacccgctaggaatttaagattagctgccgcaaggggagggaggcagggagaacgggcccggcggggtgggtcggggtaagtcaccccgtcacgggggcaggccactccactgggcgtcctctccgagcctcagggcccttgtgtccgaagggtgagggattaaggaagggcttggctctcatgttgtgtttgggcagctgacccctgggagctccgatgtttcctcccaagacttaaatggatctggggtgggctaggtgcggtggtggtgcctgtgatcccagctactcgggagcctgaggcaggagaatcgcttgaacctgggacgcggaggttgcagtgagctgagattgcgccactgcactccagtcaaaaaaaaaaaagacaaataaatgggtctgggatgaaggaaaaccggccgtgcctttgggacctccaagcaggagggagtctgttgtaaatacccctaggaggtggtggaccatcaacccgatttacagagagggaaactgaggctctgggggacaaagggacttgcccggagccttgagtcctggcagtctcagaggcaggaggggctccgccaggcctggggtgtgagggtgccttatctgggagagggtctccctgccatgcgcctagctggtggaggccctggaggggtccctggctggacccctgcttgccctcagcaccccatcctcatccctccacccagcccccaccccccatactcccacgggccctgcctgggcatgaggcctggctctcagggatgaaaggcccagtttctctggctgttaaggcttccagggctctccttgggctcttgatgttcccccatgcagctctcacacccctgatgggtggggtcagaactagggttaggggtatggggtgcccctcgtcaggtatccctgaggtccaagctgggtccttgcagggctctgggggggtggggcacggggcagggccggcaggcagccaatcctaaattctgagcctggcgacaatgcttgaagcccccttgcctgcctcgctctgacccacccccgcctcccgcatgtcccccagccgtgctcctgggtggtcccgcggcaccccccaccatcgctccgtctggatctggggctcacccacccaccgactagagggcacccccccgcccctcctgccctctgggggtcaggcagcttggggctcagatgttttggtgtaagatgggggtcagtcagctgggcaccgtggctcatgcctgtaatcccagcactttgggaggccgaggcgggtggattaccaggtcaggagattgagaccatcctggctaacatggtgaaaccctgtctctactaaaaatacaaaaaaaaaaaattagatgggcatggtggcgggcgcgtgtagtcccagctactcgggaggctgaagcaggagaatcgcttgaacccgggaggtgtaggttgcagtgagccaagatcatgccactacactccagcctgggcaacagagagagatattgtctcaaaaaaaaaaaaagatagggtcagtccctgggcctttacccagcaagtgtcctagaagcccagactggaggtgcctggagtggcattcgacttccgcgggagtgaagacccccaaatgccaatatttggggagcccccatctccttccctctggagcctgaccccagccctatccttgggctgtgtcacccactgtgcctggcacaggcctcccctgaagatcctgctctatccaggccacttcctcggtgctaccccagttggcctctgaccttgaacaccccagaggctggcttggggctcaggtgatctaagccctgggaaggagtgggttagctggaagccaggtcagagggggcccagtctccagaaaaaggccaaggggatttggggactgagagctgagtgggaacagatcctagagccacccccagacccagagagccaagccctcggcccgctagcatggccacaggcagaacctctttgcagcccctctggccgaagtcccaagcctggctgtgaccaggactaagttctgtcagtcttggggcctgtctccctgggtcccaaatatagccccaggcatctccccagtgccaaagccgatgcccctctcttcccaacccccagatgcaacataggctgagttgggggactcatgctgtcctccagtctatgtccttcctatatggacgtcccttcttcactcgagccccaggtggtgatcctccagcctcccacctcctccagtcctcctccctccttggggccttgctggctgagaaagttcttcctggtgtctgtcctgaattcttgcctccacctcctgctgcttctggtgctgtggtcacccatccccctgtctgtgtgtgtctgtcgttgggagggggattgtatgttcatacaacctcacctgggcccctctctgccccatccagggaagcagcttgggggggcaggcaaagggaatgtggaagggctgtagcgggggagagggtgcgcctgtcctgtacccacaggacatagccccaacgcagcgaggtggactcagggccctccagccctggcgctgccccagggggtgtgatggaggcaaaggggatggtatagactgagccctccctcttcccactctggctcccccaggtaccacgacaagcaggaagtgaccagcaacttcctgggggccatgtggctgatttccatcaccttcctctccattggctacggcgacatggtgccccacacctactgcgggaagggtgtgtgcctgctcactggcatcatggtaagggtgagggtccatgtgtatgatcctgggaggtccagccagctgcccgctccaccagcccttgcataccccttgctgacagggtgctcatcccatcacgagctgtgcctgatcagcgtccctccatctgtcagtccacccctcccctgctctgctcttttcctctgacgtcacgtggaagccacacccacaggcttcctgggacatctccatgcggtccttccaggcctagatatgcagctcccaccatgcctgcccagtaagaagctgcggtccactctgaccagagagtcactgtcacccctttattctctacagcctgatttattcacagcctttggatccagggcaaggggcttgatgctgatgtgccttagtttcctcagctgtgaccagcgctacttcctctgctttgcaagggctaagtcggttatttatgtgagaatcccagaactgtgaatgccatggacatgctataactacctgctgggggccgggcgtggtggctcatgcctgtaatcccagcactttgggaggccaaggtgggcagatcacctgaggttgggagtttgagatcagcctgtgaccaacatggagaaaccctgtctctactaaaaatacaaaaatagccgggagtggtggctcacacctgtaatcccagtactttgggaggccaaggcgggtggatcacgaggtcaggagttcaagaccagcctggccaacgtggtgagacccagtctgtactaaaaatacaaaattagccgggcgtggtggtgggtgcctgtaatcccagctactagggaggctgaggcatgagaattgcttgaacccaggaggcagaggttgtggtgagcggagatcacgtcattgcactccagcctgggcaaccagagtgaactaagtctcaaaaaaaaaaaaaagaaaaaagaaacctgctgggctgtgtcctctgcagcccaaactcccttccttagctgactttcggggtgttccctgagtttttcgtgacagtgggcgcaggcagcaccccgtctccccgaaggattctcaagtctgccgtgggtgcctgtgaacatcctttcacactcactgctttctcttttccctaattcagtcatcggggtccctgtccatcccctctttccagagccttctttctctccagacatgttttatgcccatgccaacaaacgcttttccatgttttatttttatgtttttataaagatggggtctcactatgttgcccaggctggtcatgaactcctgggctcaagtgatcctcctgcttgggcctcccaaggtgctggagttacaggcctaagcaactgcacctggcccatgcctgactttgtttttttcctcattgagatggagtctcactctgttgcccagcctggagtgcaacggcacgatcccagctcactgcaacctccgcctcccgggttcaagccattctcctgcctcagcttcctgagtagctggaattacaggcgcctgccaccaggctcggctaatttttctatttttagtatagacagggtttcatcatgctggccagtctggtcttgaactcccaacctcagataatccacctgcctcagcctcccaaggtgctgggattacaggcatgacgccaccacgctggccctttttttcttttttttttttgagatagagtctcgctctgtcgcccaggctggaatgcagtggcgtgatctcagctcactgcaaccttcccctcccaggttcaagcgattctcctgcttcagcctcctgagtagctgggatggcaggcacctgccaccaggcccagctaatttttgtatttttagtacagacagggtttcaccatgtcgaccaggctggtctcgaactcttgacctcaggtgatccacccaccttggcctcccaaagtgctgggattacaggtgcaagccactgcacctggtccgtgtctgcttttttgctggcagcccagcatgggtccctccctgtagcatctgtgtggtgcatcatgctgttgcagagccgttgtccattccttttccttgctgtctagtattctaggtggaggtttccagcaagtcactctgtcccagttgacagggattttcctgagaacaggcttctgggtcctctcaaaacctttgtcctggcctggaaaccgagacagggtttcctccgggagcccctgcttgtgctctaggccaaccctgctcaggctcagggtgttggcatctaaacctgcctggggctgggcatggtaatggctcatgcctgtaatcccagcactttgggaggccgaggtgggtggatcatttgaggccaggtgtccgagaccagcctgggcaacatagtgagaccccatatcgctaccaaaaaaaaaaaaaaaaaaaaacagggccaggcgcagtggcttacacctgtactcccagcactttgggaggccaaggcgggtggatcacctgtcaggagttcgagaccagcctgaccaacatggtgaaaccccccctttactaaacaaacacacacacacacacacacaattagcgggatgtggtggtgcacgcttctagttccagctactcaggaggctgaggcaggagaatcgcttgaacctgggaagtggaggttgcagtcagctgagattgtgccactgcactccagcctgggcgacagagcgagactccatctcaaaaaaaaaaaaaaaaaaaaaaagaatcgtcctacctcctggagttgttgggggtcgaatgagctaatgtgtgggacatggttccctctgacatttgatgaataggaaacgagtagacctgaagtcagtgagctcagcagatggaatccactcacactgctggctcagagaatggggaggctgcaatctgggcaggcttcctggaggagggagtgacctcaagacaggacgctgatgtgccccctctgccctgcacacagggagctggctgtaccgcgctcgtggtggctgtggtggctcggaagctggagctcaccaaggctgagaagcacgtgcacaacttcatgatggacactcagctcaccaagcgggtgaggaccgcggttcccatggaggccgcctcctggccttgtcagcgagcgtagaacttccctgctttccctctgtacgtgccgggcatgctcatgtgcccatgggttaccatgcagccccgtgtcaagactgtgctggctttgggaggccaaggcaggtggatcacctaaggccaggagttcgagaccagcctggccaacatggcaaaatcccatctctactaaaaatacaaaaattagcctggcatggtgacggacgcctgtagtcccatccacttgggagtctgaggcaggagaatcgcttgagcctgggaagcagaggctgcaataagccaagatggcaccactgcactcgaacctgggtgacagagcaagactccgtttaaaaaaaaaaaaaaaaggactgtgcttggctctgccaccacgcacccatctgtgagtaatgcacagagagacatcgtggcatcaacccttgtgcccagtcacgtccagccatgagcattcagtaagaggcttgagccagaccgccatatgcaatttgagagctgcctgaccctagcgggttgactgctctgtacctcagcttccccatatagaaaatcagggaaataaaaacacatgccgattcactgagttaacatctgcatcatggccgggcgcggtggctcacgcctgtaatcccagcactttaggaggccgaggcgggcggatcacttgaggtcaggagttcaaaaccagcctggccaacgtgatgaaaccccatctctagtaaaaatacaaaaattagctgagcgtgatcgcaggcgcctgtaatcccagctactagggagagtgaggcagaagaatcacttgaacctgagaggtggaggtcgcagtgaggcaagatcatgccactgcattccagtctgggccacagagcctcaaaaaacaaacaaacaaacaaacaaacaaaaaacattaaaaacatttgcatggtgcatagaaggggcctggcccatcatgagtgatgtgtgttaggtatacacacactgcacagatgttgttgtacaagcatggccctgccttatagcccagggaccctgagaggcatttccagaagtttctagaggtttctggaagattctagacatttctggagccttttggaatttcgcgccaaccctgaggaattgttctttttctggccccaggtaaaaaacgccgctgctaacgttctcagggagacgtggctcatctacaaacataccaggctggtgaagaagccagaccaagcccgggttcggaaacaccagcgtaagttcctccaagccatccatcagtaagtccagcacctttccagctcacgtttctgtgtccacatggcgcggaggcagccctcgcagctctgtgtggcctcttcacggctccctgccagggacgggtggtcagttggttggggcctgcatcttctgagctgggtggatgggaggatcttcagagggaggcagatgatggggtctgctaaatcatggacacgactcagtaagtggcaggatgtatattttattctctggaataaccaggataattcttaccctttagactttgaagcgatttcctctttttgctttgtctgccaggaggctcatagttaaatccatggtctgatccatgggatcatgtaggataactagaaatgaattgggccaggtgcggtggctcatgcctgtaatcccagcactttgggaggcaggaagatcgcttgagtccaggagttcaacaccatccgtggcaatacagggagaccccatctctacaaaaactaagaacttaactgggtgtggtggtgtgcctctgtggtcccagatactcgggaggctgaggtggaaggatcacttgagtctgcagggtcaaggctgcagtgagccatgattgcgccactgcactcagctgggttacaaagtgagaccttgtctcaaaaaaaaaaaaagaaagaaaagaaaaagaaaaaaaaggccgggcgcggtggctcacgcctgtaatcccagcactttgggaggccgaggtgggtggatcacgaggtcaggagatcaagaccatcctggctaacacagtgaaacctcgtctctactaaaaatacaaaaaattagccgggcgtggtggcggacgcctgtagtcccagctactcgggaggctgaggcaggagaatggcatgaacccaggaggcggagctcgcagtaagctgagattgcgccgctgcactccagcctgggcgacagagtgagactctgtctcaaaaaaaaaaaaaaagaaagaaaaagaaaaaaaagaagaaagaaattgcttgattccctatgttgtttctttgccctgagaactatttaataaagtagctctaaatccttggctgctcattgaagtcaccagggggctttttaaaaatcccaagagccacatccaacatcagttacttagtagagtctgggttgcagtctgggtttacatttaaattcctcaaatgactgcttggttgggcatggtggctcacacttataatccctgcactttgggaggccaaggagggaagactgattgaggccaagatttggaaaccagcctgggaaacatagtgagaccccactctatgtaaaaattaaaaaataaagcgaggcgtggtgactcacacctcgtaatcccagcactttgggaggctgagccaggaggatcgcttgaggccaggagtttgcaaccagcctgggcaacaaagtgagaccccgtctctacaaaaataaaaaaattagcccagtgtggtggcatgtgtctatggtcccagctacccaggaggttgaggtgggaggataacttgagcccagaaggtcaaggttgcagcgagctgtgattgcgccactgcactccagcctgggccacagagcaaggccttgccttaaaaaactatatatggctgggtgcagtggctcacgcctgtaatcccagcactttgagaggccgaggcaggtggatcccctgatgtcagcctggccaacatggcgaaaccttgtctctactaaaaatataaaaattagccgggcatggtggcacgtgcctgtaggttgtactgagctgagatcgcaccactgcactccagcctgggcgacagagtaagactcagtctcaaaaaatcaaaaataaaatatattaaaataagtaaataaataaaatttcctcagttgagtccaatatgcagccagtcagcaaactttttctgtaaagggccagatggtaaatctttcaggttttatgggccagaccgtttctgtcccactcttcaactctctgctgctgaggcagggaagcagtgaggataacctggtgtggccatgttccaaagaaaccttattttccaagacaggcggccggctagatttgacccacaggccataatatgctgacgacaatgctgtccactagaatatcacgtgagcaacatatataattttaaatttgctaacagccacattagaaaaaagtacaaaaggctgggcgcggtggctcacacttgtaatcccagcactttgggaggccgagatgggtggatcatttgaggtcaggagttcaagaccagcctgaccaacatggtgaaaccccatctctactaaaaatacaaaaaaattagctgagcgtggtggcacatgcctgtagtcccagctactcggaaggctgaggcaggagaatcacgtgaacctgggaagctgaagttgcaatgagccaagatcactttgagacagtcccctggactggcttaggtacagaagggagtgccagcaggtgcagtggctcatgcctgtaatccttttggaggctgagacgggcggatcacatgaggtcaggagttcgagaccagcctgaccaacatggtgaaaccccatctctactaaaaatacaaaaattaaaccaggtgtgctggtgagcgcttgtaattccagctactcagaaggctgagccaggagaatcgcttgaaccggggaagtggaggttgcagtgagctgagaccatgccactgcactcccgcctgggtgacagagtgagactccgtctcaaaaaaaacaaagggatggtcaaaaggggcgagggcatacactaaccaactccccctgcggccagctgtccagagaccagggtcaccagtgccaacaccaacaccaagtagcaagtgtgggttcaaatcctgccggggtgcggatgggcagtggctttacccctctgagcctcagtttccccctcaggagatggtgtcggcatagttttctgaatgaaacaccgcctccggtggtggtgagaggacaggtgtgcccctgaggggctggcacagaaccctcagaggctgggcacctccccagagcaacggcagcccctcggccatctgggaaccccgcgcggggccctagggtggcatccccgggaggtgggcagggttgggtacatgccgaacaactgtgctgaggttaaaattgccttgtgatttttctcctgctctgcccggtcctgccagggctcagaagtaagtgttctcccaggggcttggtggggctgggaaatcgggggtgcatggtggtcacagacagggggtacacccggggcatgccaaccccagcctcagaggcgggcagggttcacatctgccccatggatccgtgcaggcttcaccttggtctgggatccaacttcctggggcagtcctgagttgggccggagacaggaccagccaatgggtggtgtgggcggtggccaggctgacttctggccctggcgcaccggctgtgtactgggagggaatagactacagggaatcggcctcccaactcccacctcatcctctgatgcatgtcccataggtgaccccgggtgggtgcatgaaagtccctgcccccactgcagcctccacgggaacctgcctaaccccctcccccaaccccgtgtccccacaggctccggagtgtgaagatcgagcaagggaagctgaacgaccaggctaacacgcttaccgacctagccaaggtgagtgggttggggcagggtgggccagacagggcaggtggggccccggagcagatgggatggggctcagctcctgccggaggagggcacaaggacccgctgtgggctgagtgcagtggcgggcggatcgcttgagctcaggagtttgagaccagcctgggcaacatggtgaaatcccgtctctacaaaaaaaatacaacaattagccaggcgtggtggcgggcgcctttaatcccagctacttgggggctgagggaggagaatcgcttgaacttggggggttgaggctgcagtgagccgagatggcaccactgcagtccagcctgggtgacagagtgacaccctgtctcaaaaaaatgataataattttaaaaataatttaaaaatttaaaaagagtacacaattagggggctaaatgggtgaagaggtatttctagatttaggcataccacctcaattcaagatctgaaatggaagagaaaaaattcctttgctatgggtataaattcaaatgatagccttgggagaaagctttgtataatttgtatagcaattaaacatctgtcaggaaatttaaattgattgcaagagaaattggggccagctgggttcaatgggtcatgcctataatccctgtactttgggaggctgaggcaggcagatcacttgagcccaagaggttgagaccagcctgggcagcacagagagaccccatctgtacaaaaagaataaaaaaattaaccaggcatggtggtgagtgcctgtagtcccagctattagggaggctgaggcgggagaatcacttgagcccaggaggtcaaggctgctgtgaggtatgatcactctgctgcactctagcctgggcaacagagcgagaccctgtctcaaaaaaaaaaaaaaagcaagaaagaaatcagtttgtgttatacatggatctgtgtgttgattcgaatatcaagtcatctcccacttttttttttagctttatttatttattttttgagacagagtcttgctctgtcacccaggctggagtgcagtggcgtgatctcagctcactgcaacttccgcctcccgggttcaagcaattctcgtgcttcagcctccagagtagctgggattacaggcatgcaccagcatgcccggctaatttttgtacttttagtagagacggggtttcgccatgttggccagcctggtctcgaactcctgaccttaagtgatccacccccctcagcctcccaaagtgttgggattacaggcgtgggccaccgtgcccagcccatttcccactttttgaattcttccactggaagatgtgtcactggaccagttgcaattaatcaagtgcttgagatctttgcaacactgatttgaattcccttctgaccaatgacatagtttcagaaaatagcttttgctcagtggctacatcccctgatctatcagtcagcttgaggctaatttcatgttatctttagaaaatgttaagtcccattctattttatttcttgtccccagtgcattttggactcacttcctccatcactaggaagagaatgcaatctagcttaatattaacctacaagaaatttaatttggaagggaatcttcttttttttttttttctgagacagggtcttgctctgtggtacaggctggagtgcagtggcaaaatcatggctcaccgcagcctcaacctccccaggctcaagcaatccccccaactcatcctcttgagtagctgggactacaggcgcacaccaccaggtcctgctaatttttgtattttttgtagagatggggtttcaccatgttgcccaggctggtctcaaactcctgagctcaagtgatcctcccgccttggcctcccaaagtgctgggattacaggcgtgagccaccgcacccagaaaagaatcttacagagagaaaaacatattctagacccctgaagatatacagttaactctcgaacatgggggttatggggtgctgaccccttaaaagtcaaatattcccatataacttctttttttctttttgagacagagtctcactctgttgcccaggctggagtgcagaggtgcgatctcagctcactgcagcctccatctcctaggtttaaggtattctcctgcctcagcctcctgagtagctaggattacaggtgtatgccgccacgcctagctactttttgtatttttagtagagatggggtttcaccatgttggccaggctggtctcgaactcctgacttcaagtaatccacctgccttggcctcccaaagtgctgggattacaggcataagccactgtgcccggcctcatataagttttgacgccccctcaccccaaatttaactactgatagcctaccattgaccaaaagccttactgataaacagttgattcacatatattttgtgtatatatactgtattcttacagtaaggtatggtagagaaaggaaaatattaagaaaatcaggccagatgcagtggctcatgcctgtaatcctagcactttgggaagttgaggaggggggatcacttgagctcaggaattcaagaccagcctgggcaacatggcaaaactccattgctacaaaaaaaaaaaaaaaaaaatagaaaaattagcaggaggctgaggtgggaggatcacttgagcctgggaggtaaaagctgcagtcagctgtgactgtaccactgcactccagtctgggagacagagcaagactctgtctctaaaaaataaaattttaagcctgggtgtagtggctcatccctgtaatcccagcaccttgggaggcaaaggtgggcggatcacctgaggccaggagttcaagaccagcctggccaacatggtgaaactttgtctccactaaaaatacaaaaattagccgggtgtggtagcgggcacctgtaatctcagctacttgggaggctgaggcaggagagtcgcttgaacccaggaggtggaggttgcagtgagccgagatcatgcctctgcactccagcctagacaacaagagcgagacttcgtctcaaaaataaaaataaaaataaaaattttaaacctcagaaaagactaaaaagaaccacctgaaggctggacactgctctggcctccagatgtcaccctctggctctagggactgtggtgcctgagagaggccagggtaaggtcagtggtgctaggaggggaggcccccacaaggtgtttgcactcggagtggggtctgccttgcactgatggagggaaaagggtagggggcacagtggaggaagctgggaggaagaggctgggtgtgagaggacagaggagctggggtgggcacctcgtcctgtcctgtcttccttccaccactgcctccatcctcccacggaggccgccgcggggtggcaaaccggtgtcctgacccagctgcgctcagagccgtggagtgatgttctagtgccacctggtggccagagtggtgtctgcacccaggactgtccctgcctggccggcctcccctgcccatagggggacagtgccagaaccgggcagttgaggtggtagggatgccccactggctgctgtaacagtaattgtggctgtcgtgttcccagtctgtgattgcgtcagattctcagggcagtcaccttcgtcattagacccctgtcccctccccagcctaatgggaggggtggcagttcacgactgaacagggtcccccctcctcttcttcctaggcagccatgtccccacgctcctgctgttccccagcctggagcaacgtcagccccaaacatcccccaggtctgtgggtaccacttgagcactgcctgtggctatgtgtgccctgtggccactagacccccagggcagctctgggcatgtccccccaccccagaacctcactaggcctttcccaggcctgccagccctgagcttggcttgcttgctttctttttcttgagacggattttccctcttgtcactcaggcgcactgaaacctccacctcctgggttcaagtgattctcctgcctcatcccccccgagtagcggggattacaggtgcccgctaccacatccggctaatttttgtatttttagtggagacaaagtttcaccatgttggccaggctggtctcaaactcctgacctcaggcgattcgcctgcctcggcctcccaaagtgctgggattacaggcgtgagccaccacaaccagctgagcttggcatttaagacctgtcttttaggctgggcgcctcccggaaagaggaggttgtaatgagccgagattgggccactgcactccagcataggtgacggagggagtctctgtctcaaagaaaaaaaaaaaaaagagagaaagaaaagaccagtctctcccctcatccactctccaatccttccctgggcccagcaagggacctctggggctgggggtatcctcccagccacccctcacacgggccccattagtggctggcacccacctggagcgtgtgggctgtccctctctgtcattggtgtcgtggtatcgtcctttcctctctcactcagcggcgcctctctcctgcccctctctgtctcccgcagacccagaccgtcatgtacgaccttgtatcggagctgcacgctcagcacgaggagctggaggcccgcctggccaccctggaaagccgcttggatgcgctgggtgcctctctacaggccctgcctggcctcatcgcccaagccatacgcccacccccgcctcccctgcctcccaggcccggccccggcccccaagaccaggcagcccggagctccccctgccggtggacgcccgtggccccctcggactgcgggtgacggccctgcccgccaccagacccctaaatcttggccatcgtgtggccgccacctccgggaagccttgtacagtggcgcctcttggagttcaagaagccaacgctgagtcaggctgagtggactgaggcctgccccgcccagactgcccaggcagagggcagggctggaccatgggtgagggcaggggagcccggagcttcctctggtcacctggtcccccgactctccccaggcccccggtgggcatggagcagcccggggaggggtccgtgctggttctgaataaagcaggacccgcctagtggctgcctgtgtgcatggctggaaggcactggtgatgtcccaggaggtagacctccagccctgggtaccaagatgaatgtgggaatcagaaaaacctgttcccatcaccggcctagcctagaatcctagcctagaagccctctctccctctgggctggagctcagtgagggacaactctctagggacacctgtaccagccccacctggcgctgagatccctcagacagcatggcccagccctggccagaagcatcgctccccttcaaccaaccgcgttgatggacacccactgtgtgccaggccccagcggggcccatgggggaggtgacctgggtgaggaaggtcatttgggtttttgtgagatttgtattgagcacctgctgtctacagagaatgtgatgatgtcaattaccacactgattcctcatcagaacttgaccatggtgggatgggggggaaactgaggcccagagaggtgaatctacctacctgggaccacactgcgaggaaggatggtgcattcaaactggaaatcccctaggccaaagtaaagaaccggactggctgggcacagtggctcacacctgtaatcccagcactttgggagggtaaagcgggcggatcacctgaggtcaggagttcaagaccagcctgggcaacatggtgaaaccctgtctctactaaaaatataaaaattagctgggtgtggtggtgcacgcctgtaatcccagctacttgggaggctgaggcaggataatcgcttgaacccaggaggtggaggttgcagtgagaaaaaacctggacttggtggaagggactccatggaggagccatggggacgtcaggaggaggggttatttggtgacatccaggggtcagagagacccttcaggggtgggctacaggggagggttccagacacaagtagaatcagaaaggtccctggaggccatgggcttgggtgctgggagcaacaggcatttacttggcagatgctgagccctgggtggggcgaggaggcctggctcctggggagacgacgctgtgcatagccgaggagccccaggtcctggcagcctctgataaggccatccatcgcctggctcaacgagataactaggccgtggctggtgcatgaatgaccagcttgggcccacgcacgagaagggtatgaggaggtgctggtcagacccgggttcgagtcctgactctgccactgctgggtgactctgagcagtggctgcccctctggggccttggttgtttcatctgtaaaatggggtgacagtctatttaaccagaactccctaaaaagggccaggcaactggtaggtgctcaataaatgctccttcccgcctgagggatcacactggagtctttggcaggactcatcctttctaccctgttgtctggctggggaaactaaggcctgagaaggaaaggggctgtccttcagggtgagaacccagggtttggttaaggaacatccgtgggtgtaccttctgtgccagtggtagctcccaggtctgatggcagaggcacagtaaacccatagtacttaaaaaaaaaaaaaaaaaaacaccaaagccataaagttatgaacaggccgggcgtggtggctcacgcctgtaatcccagtacttcgggaggctgaggtgggaggatcacctgaggtcaggagttggagaccagccggccaacatggtgaaaccctatctctactaaaaatacaaaaattagctgggcgtggacgactcctgtcgtcccaggtactcaggagactgaggcaggagaattgctagaaccagggaggtggagattgcagtgagccaggatcacgctactgtgccccggcctgggcgacagagcgagactctgtcttaaaaaaagagagagagaaagagaaaagtaaacaaggcaagaaagaaagagaaaaaaagaaagagaggaaggagggaaggaaggaaggaaggaaagaaagaaaaaacagagaaaagtaaacaaggccagaggtggcaaggggactctgaggaagtggcatttgggcgtgggcgggatgggtgggagaacggatctggtagcggaacggcccagtgcggaggcgaagagagctactcgaggtggattttgtttgagggacagccatgaagtgacaatgacggggagactgaggcggtgccgggttctgggcggcggggggggcaggggtagtgaggggcgaatgagaccatagggctgagatctgcggccgcctcggtgcctccccagccacctccgcccctgcctgcttctgattcaacagcgccgaccctacaaaaacagggcccgcccatctccgaggatggcaaagtcaacagtgcgggcacgcgggcggccagtccccggcggcccgcgtgcgtcacgggggcggatgcagaggaccaggaagttcgccgacgacgcgcccgccctgggccaccggcgccggcccaagttcgccgggggggcccggaggaagcttgggggacgcgacgggggaacgcggaaaccccggggatctgcaggcgcgcccgggccgtgtgccttctctccgcgtgtccaaaccgtgtccccagccgcgcgccatgcgctctgggggcgtgcgcagcttcgcgctggagctggcgcggggcccgggcggcgcctaccgcggcggggagcggctgtgcggccgggtgctgctggaggcggcggcgccgctgcgggtgcgagcgctcgaggtgaaggcgcgcggcggggcggccacccactggttggagggtcgcagcgtgggcgtcaacgccgtatccagcgactacgcggccgcggagacctacctgcggcgtcggcagctgctgctccgaggtgagacactcgtcgcgccgcccccgcagcagccgggaccccctcggccgcgaccctcttcagggccggaagcctctcaacttagaacctatgcggtcgggtgatccttttcaaggagggggaaacccccttcccggggtcctgaccctcccacaggtcaggagttcaagactagcctgggcgacatggtgaaaccccatgtctccaaaaactacaaaaattagccaggcttagtggcgcgcgcctggagtcccagctacaggctgaagtgggaagatcgcttgagcctgggaggtagaggttgtaatgggctgagatcgcaccactgcactccagcctggacacccaccccgccctggtcaggacccccactaaccgggaacgtctacccagggtctgggtgttcccttctctggagccagactccctcaacttagactgtgcggtggggagacccctttcaaagcagggggaccctcctattagagtccaggaaacccgcgggaagtagagtgggagatctccctggtggaccccagtgtccccgttgatcccaggcctggagtccctgattctcagagaaggcccccaactcgtgttacccagggccccacctcagtttaccccacagggtctgcagcgctgagttcttccctggggtagggttgggggtctggtggtatttcccggtgaggaggtggaaatgcatcccagaggggaagagatgaagtggggtcacattctcctgggagtctgggtcttgggcaggtccctactcttccccgaacctcagtccttctcgcaccccaagcgcccctaggccacgcagctggtcaccagcgagccaggggtcacagaaggaggcagtccataccctcacaccctactgtgtggctgcgggagggcatcatcctctctgggccgccctggctattcctccgggccaagccagacctcactatacccgtctgtaaaatgggccgggagggaggcagctcagattctcgacagccccacttttttcccagcgctgcgggcaatagaagttttgggcacacaagagccacaggtgcgggggacccttccctccccagcggtggaaacagaagcaagtgcggtggggcagggcaggaaggggcccaggaggcacttcccttccccggcgactcggagaactcttgggaccgctttcacccgaaggccggcccagacactcaacggcgacttccttaaaacactggagaggcagccgggtgcggtggctcacgcctgtaatcccagcactttgggaggctgaggcgggcagatcacctgaggtcaggagttcgagaccagcctggccaacatggtgaaactttgtctccactaaaaatacaaaaattagctgggcgtgctggtgggcgcctgaaatcccagcaactcgggaggctgaggcagaattgcttgaacccggcaggcggagattgcagtgagctgagatggcaccactacactccagcctgggcaacagagcgaaactccgtctcaaaaacaaaaacaaaaacaaataaacaaaaaacactggagaggcgagcctggtgggtccacctgtggtcccagctatcacagaggctgaagcggaaggattgcttgagctaagttagaggccagcctgggcaacataatgagacctcccaccctccactccgtttttgtgtttgtttttgtttttgagacagggtcttactctgttactcaggctggagtgcagtggcacgatctcggctcactgcaacctctgcctcccatgttcaagtgattctgcaacctcagactcctgagtagctgggactacaggtgcccgccaccacacccggctaactttttgttttgttttgttttgttttgttttgtttttctgagacagagtctcactctgtcacccaggctggagtgcagtggcgccggcgcaatcttggctcactgcaacctctgcctcccaggttccagtgattctcctgcctcagcctcccgagtagctgggattataggtgcccgccaacacgctggctaatttttgtttgtttgtttgtttgtttgtttgggggacggagtctccctctgctgcccaggctggagtgcagtggcaccatctcggctcactgcaagctctgcctcccgggttcacgccattctcctgcctcagcctcccgagcagctgggactacaggcacccgccaccacgcccggctaattttttgtatttttagtagagacggggtttcaccatgttagccagaatggtctcgatctcctgacctcgtgatctgcccgcctcggcctcccaaagtgctgggattacaggcatgagccacagtgcccggccaatttttgtatttttagtagagacgggtttcaccatgttggccaggctggtcacgaaatcctgacctcaggtgatccatccacctcggccttccaaaatgcttggcttacaggcatgagccaccatgcccggcccccatctctttaaatacataaaaattggctgggcgcagtggcttatgcctgtaatcccagtactttgggaggctgaggcaggaggatcacttgaggtcaggagttcaagaccagcctggccaacatggtgaagccctgtctctactaaaaatacaaaaattagccgggctaacttttttttttttttttttttaggcggaatttcactcttgttgcccaggctggagtgcaatggcatgatctcgcctcactgcaacctccacctcccaggttcaagtgtttctcctgcctcagcctcccaagtagctgggattacaggcatgcgccaccacacccggtaaattttgtatctttagtagagacggggtgtctccatgttggtcaggctggtctcgaactcctgacctcaggtgatccgcctgcctcggcctcccaaagtgctgggattacaggcgtgagccaccgcgcccggccaaggtgggctaatttttaaattctcccagctactcagggggctaaggcaggagaatcgctggaacccggaaggtggaggttgcagtgagccaagatggtgccactgcactacagcctgggtgtcagagcagagtgagaccctgtctcaaaaaaaaaaaaaattaaaattttggctgggtgcagtggctcacacctgtaatcccagcactttgggaggctgaggcgggcagatcgcttgagctcaagagttcaagaccagcctgggcaacatggtgaaaccccatctttacaaaaaatacaaaaattagcggggcatggtggtacacacctgtaatcccggctactcgggaggctgaggtggaagggaggcagaggttgcagtgaacctagatcgcgccactgcactccagcctgggcaacagagtgagatcctgtctcaaaaaaaaaaagaaaagcaaatttaaaaaaaattttttttttttaattgatcattcttgggtgtttcttgcagagggggatttggcagggtcataggacaatagtggagggaaggtcagcagataaacaggtgaacaaaggtctctggttttcctaggcagagtgtttgtgtccctgggtacttgagattagggagtggtgatgactcttaacgagcatgctgccttcaagcatctgtttaacaaagcacatcttgcaccacccttaatccatttaaccctgagtggacacagcacatgtttcagagagcacagggttgggggtagggtcaccgatcaacaggatcacaaagcagaagaatttttcttagtacagaacaaaatgaaaagtctcccatgtctacctctttctacacagacacggcaaccatccgatttctcaatcttttccccacctttcccccctttctattccacaaaaccgccattgtcatcatggcccgttctcaatgagctgttgggtacacctcccagacggggtggtggccgggcagaggggctcctcacttcccagtaggggcggccgggcagaggtgccccctcacctcccggacggggcggctggccgggtggggggctgaccccccgacctccctcccggacggggcggctggccgggcagggggctgacccccccacctccctcccggatggggcggctggctgggtggggggctgaccccccgcctccctcccagacggggcgactggcttggcgggggctgaccccccacctccctcctggacggggtggctgccgggcggagaagctcctcacttcccagacggggtggcagccgggcggaggggctcctcacttctcagacggggcggctgccgggcggaggggctcctcacttctcagacggggcggccgggcagagacgctcctcacctcccagacggggtcgcggccgggccgaggctctcctcacatcccagacggggcggcggggcagaggcgctccccacatctcagacgatgggcggccgggcagagacgctcctcacttcgtagatgggatggcggccgggaagaggcgctcctcacttcctaggtgggatggcggccgggcagagacgctcctcactttccagactgggcagccaggcagaggggctcctcacatcccagacgatgggcggtcaggcagagacgctcctcacttcccagacggggtggcggccgggcagaggctgcaatctcggcactttgggaggccaaggcaggcggctgggaggtggaggttgtagcgagccgagatcacgccactgcactccagcctgggcaccattgagcactgagttaacgagactctgtctgcaatcccggcacctcgggaggctgaggctggtggatcactcgaggttaggagctggagaccagccgggccaacacagcgaaaccccttctccaccaaaaaaaccagtcaggcgtggcggcgcgcgcctgcaatcgcaggcactcggcaggctgagacaggagaatcaggcagggaggttgcagtgagccgagatggcagcagcacagtccagcttctgctcggcatgagagggagaccgtggaaagagagggagagggagaccaaggggagagggagagggagagggagcttaaaaattgttaaattgttatacatttaaggaaaaaacagtgacactggaggggcgaggccagtggaggtgctgtgtgacctcgggcagagccccacccatctctgggcctttggggtccgtctgcgaaatgaattgagggaggcgctggctcagtagtcccttcagggttacctaatcccgcttctcctcccggacttaacggcctactgtctcccctctagtatccattgaaacctggcctaaggtcccagaccttcctttcaactccaaagacccatcctcccaggcagccttccaggctgatcactgtgcctccaactccgtcgttcctgttccgatccccatcacgggctgagggtgaccgtgtttgtttatgaccgccccctccacccacacacctcactgaggtggtggaagtctcctgagccaggctcagaggcggacagtcacggcaggggatgggttcagcggcagcgcattacgctgccacgagagggcgccagcgtcccgcagacgacgcagaggcaactcccgctggagaaactccatgcgacttttctttggggaaactgaagcccagagagaggtcacgccgtcccgtggccacaccgcagctgtggacctgggggtgcccgagcgtcccctgcattcagctctgtggcgggacgggggctgaggatgactggagcaggcacaagggctgcggggaaggtagggtttgccagaggctgaaaattgggaagggaacatcatttcgtaggtaccgctcctgggcgaatgcgccgaggcgcgaccgagtgacggtatgtcaagagcaggttgatgacccgggagcgaggctcttggaggagtccagctggggctgcacgatgatccatgcacaaccttctgaggtcaggactgatttttactttctcccggctctacagaggtggaaactgaggctccaagaggttgtcatttgcccagagccaccagctaagcgggacttgaatcaggaaaggggtgcagcaggcaccagtgtggagggcggtcccacccacctcctccacttctccctttgcatagcgggggaaacaggcctggaacagtcataggctctctggccctcaactggggcgagagtcccccgccccaaatcgggctggacatgcctcgagtcacgtcaacgaggggcggctggtgagtgattaagccgagaggctgaaggctctgctaggtgacctcaggcctgggccctgcctctgcacctctttttttcctctttacccccggggtccgcgagagaccagctctggcagcctaagggcttcagtttctccccggggtccgcgagggaagggggcagccggcggtgagcaggggcgtttgttattttgctccacgcctgggcagagccacgccccttgtcgcgctattggtggagtcccttcccggggcggggaagagacggtgaccccacccccccccgccctgccgtataaaagcggcgccgacgcacggcgcggggattttctgctccggttggtgagcgcgcctgcgcgttgacggcgattttgcgttctgaggctgcagcgtcggcatcttgagctgccggttcgcgagttcgaggccaggttccgcctgtcgtgggttcgcaccccggacgcgatgctattcgacaaggtgaaagcgttctcggtgcagttggacggcgcgaccgcgggcgtcgagcccgtgtttagcggcggccaggccgtggcgggccgggtgctgctggagctgtcaagcgccgcgcgtgtgggtgccctgaggctgcgcgcgcggggccgcgcccacgtgcactggaccgagtcgcgcagcgcgggctcgagcacggcttacacgcagagctacagtgaacgcgtggaggtcgtgagccaccgcgccacgctcctggcgccaggtacggatggaggacccctgctccaacaccagttgtgtgcctcccaccacctggacggcggtacctccgtcagccctgggaccccagcgcaaccgctcagtcgcctcctttttctcctacctgcagataccggggagaccacgacgctgcctcctgggcgccatgagttcctgttcagcttccagctgcccccgtaagtcctctggggtgcagggttgccctaagcctgcagccccttccagattggtacctccaatactggatatctgggcacctctgagccccaagactctccccctgggaggcccccggagtgtctgtgtctccttctccctgcctgcttgtctctgtatcttgtcccctgaagtcccgtccctccaccctaggaccctggtgacatccttcgagggcaaacacggtagtgtccgctactgtatcaaggccaccctgcaccggccctgggtcccagcacgccgggcaaggaaggtgttcactgtcatcgagcctgtggacatcaacacgccagccctgctggtgagtggccacccttggggaggtaggttgggagtattgtaggaaggggcctgcctggctgctgggcgacaccaaccaataagatggaggtcataggtgggccctggcagggagggaggcaggtgtgggaatgcgtgtggaatccactgggatctgcacccatttgccgtgtgactctgggcaagtgtcttgaagccctctctgagcctcagatgcctcttctgtgaaatagaccagagctagggcttaccaagtgtgaattacacaccaaacacttggcttatacatttcatttctggctttataagatgggttgtgttcctggctctatttaacggatagttcctggattgttaaaaagaaaccaagccctgcccaaagtcctccctcagctgggggtggtttggaagctccacagcgactgtggtttgcacaaagtgactcatccatgtcactttcctctacaccgacaggcacctcaagcgggggctcgggaaaaggttgcccgatcctggtactgtaaccgtggcctagtctccctttcggccaagatcgaccgcaagggctacaccccaggtagcaggcggaccggactgggttgggacgggggctggtgttggggttgcaggaggggaaactgaggccccactgctccttgctgcaggagaggtcatccctgtctttgccgagatcgacaacggctccacacgtcctgtgctgcctcgggcagccgtggtgcagacacagacgttcatggcccgaggcgcccgaaagcagaaacgggcagtggtggccagcctcgcgggcgagccggtgggccccgggcagcgggcgctgtggcagggccgggcactgcggatccccccagtgggtccttccatcctgcactgccgcgttctacacgtggactacgcactcaaggtagggcatcctgctggccctgggggacagtgcctacattcaccctgtattccctcagactgggggaagctgaggcctcagtctccccaggcataggagggaggtgggggttggggaggctgcctgggcaccctcccttatggttccttcctccaggtctgtgtggatatcccaggaacgtccaagctgctgctggagctgccactggtgatcggcaccattcccttgcacccttttggcagccgttcctccagcgtgggcagccacgccagcttcctgctggactggaggctgggggccttgccggagcggcctgagggtaagctcccaccctgcttgcatgcagagggtgggtggatacacggagaggtggatgccgggtcaactctctcaccacgagtcccccggaatcccaaccaaaggacatacagcctggcagccccagagctggcacaagccagctcctggcccctggtcccttggagcagggctctctcctgccaacctcacccaccctgtctctcgcttccagctcctcctgagtactcggaggtggtagccgacactgaggaggcagccttggggcagagccccttcccgcttccgcaggaccccgacatgagccttgaaggcccgttcttcgcctacatccaagagttccgctaccgcccgccacccctgtactctgaggtgagctcaggggtctgagaaccacccatgcctctctgggccctgggagccttgatggggtggcagacatagtagatgggttttttttgtttttttgtttttttagacagggtcttgctctgtcacccaggctggagtgcagtggcataatcatagctcactgcagcctcgacctcccgggctcaagcaatcctttcgcctcagcctcttgagtagctgggactacaggcacacgccaccacatcctgctaatttttgtgttttgttttgttttgctttgctttttgagatggagtttcagtcttgtcacccaggctggagtgcaatggtgcgatctcagctcacttcaacttccgcatccctggtagagcgattctcctgcctcagccttccgagtagctgggattacaggtgttagccaccacacgtggctaatttttgtatttttagtagagacggggtttcaccatgttggtcaggctggtcttgaactcctgacctcaggtgatggcctgcctcggcatcccaaagtgctgggattatatgcgtgagctaccacgcccggccaatttttgtattttttgtagaaatgtggtctcactgtgttgcccaggctggtcttgaactcctgggctcaaatgatcctcccatcttggcctccccaaagtgctgggattacaggcgtcagccactgtgcccggctggcagaggattttaattgttgacagaatttcgctacatacagtcggccctctgcgttagctggtttggaatctgcagattcaaccaaacatgggtcagagacatttgaaaaataaatacatacatggataatacagattaaaaatatgataggctgggtgcggtggctcatgcctgtaatcccagcactttgagaggccaagatgggaggactgcttgaggccagaagtataagaccaacctgggtaacatagcaagacccccatctctactgcaaataatacaaaattacccaggcttggtggagcccatctatgattgggaggctgaggcaggaggatcgcttgagcccaggagtttgaggctgcagtgagcaatgattgtgctactacatactccagtctgggagacaaaacaagacctcatctcaatactactactaatagtaataatgcagtataacagtgattaaatagcatttatattttgtgtgtgtatatgtgtatatatatatatatatattttttttttttttttttttttgagatggagtcttgctgtgtcacctaggctggagtgaagtggcacaatctcggctcactgcaatctccacctcccgggttcaagcaattctccctgtcttagcctcccgagtagctgggattacaggcatccaccaccatgcccagctaatttttgtattttttagtagagacggggttttgccatgttggccaggctggtctagaattcctgacctcaggtgatctgcctgccttgacctcccagaatgctgggattacaggcgtgagccaccacacctggccataaagtattataggtaatctagaagagatttaaagtacacgggagggctggatgcagtggctcatgcctgtaatcccagcactttgggaggctgaggtgggcagatcacttgaggtcaggagtttgagaccagcctggccaacatggcgaaaccaggtctctaccaaaaatacaaaaattagctgggtgtggtggcatccacctgtgatcccagctactcacgaggctgaggcaggagaatcgcttgaacccaggaggtagaggttgcagtgagccgagattgcgccactgcattccagcctgggtgacaaagcgagactctgtctcgaaaaataaaatgaaataaaaataaagtacacaggaggatgggcttagattatccgcaaatattatgccattttatatcagggacctgagcatctgtggattttggtatccacggggttcctggaaccaatcccctgtggataccaagggacggtatacactcagctccaaaaccctccttgcaccccagtctgccctagacaccacctcctgatggcctcatccctggtcaagggcgggagttgggagatggctagatggggagcggtatttctgaatttctgtttccagtgttctctgaggcttaatgggaacatttctcttaggaggatccaaacccactcttgggggacatgaggccgcgctgcatgacttgctgaacggcacagggacccctcgaggaacaaggttgcacaccagctttcagccaccatgactgtggggagtggctggaccaagggctgacctccccgactgcatcaaagttggggaaccaagtctcagagtgaggcgggggcctttcggatatcacatgggacagaggaagagcccggctggaatctgacttacctggaccgctgtccttgtgaggcattgaatgcccagtgcagtatccgagagactgtttaataacctgtcttcccagccaattggtggtgctggaatcccctaggagccttcagtctgggagaaacagagccagacatagacagttccagcatcacagaaccagaagaagagacctgcaactgtgagagtccagacaggaagcagagaaggcgtccttgcggaaagggcattttagctgaggctttggagtacgaataggagctcagcaggcagacgaatgaggaataaaggtcagagaaggtcagagctgagtgacgtttggaatccaccccgtttattgtagaactgggggttcagagggcaggtgcctcagagttgaggccacacagtgaggtctggtgggtgaaaggacccaggaacgaggcgttcaggaaagcaggttgtcagagctatgtggagtctgtgggtggcaggggcagccgctccagcctttgaagactttgaaagccagagattcctggcgcaggcttggacttcctgggagctcctccaagtacccaggggcatcagagctgcctgggtgttacatggcccagggaacccaggttcagggtaggacaggcaagaccagatacccaatgtgcaaagtgaaaacactgggctccctgttaaacgatgaagaattcaagacagtgacagcattacgtcacccctggggacagaggtcagcctaaggtgacacacggggactactgtgcttccggaggctccctgtgtcctggaggagaaaagcattagagggggcagctggacaagctcccaactgcagagtcccagccctggctggggcagggccccggcctgggactcagcatttctgatatgccttaagaattcattctgttttgtacaattattttttaaaagtaaacgtgtggagaaagaatccgggcttcttggtttatttccgcccccgatctggctgctgagggaactgggactgccatccctggtcactatcttggagactaaattcctggccaaggaaggcaaaggggctcatgattgagaaggggaaactgaggcccaggactgggagggggttggtccaaggacatatgaggaggctgagctggggtgggagctgagccctgggccccatacctgcaccgcctatcggagtctcagaggctggcgggggctgaacagtggaggacaagcagagaactctatcctcagagagtggggagcagggggctggggctgggaggagccgcctgagtacgggaacatcctgtcatctgagtctaggtttggtttttgtgggtttttttctgtttgtttttgtttttcagaaggagtcttgctgtgtcgctcaggcatagtgtagagtgtagtggtgtgatctcagctcactacaacctccacctcctgggttcaagcgattctcctgcctcagcctccaagtagctgggattacaggtgcctgccaccacacccggctaatttttgaatttttagtagagacggggtttattttttttttctttctttcttttttttttaagacagagtttcgctgtgtcacccaggctggagtgcaatggcttggtcttggctcactgcaacctccgcctcccgggttcaaatgattctcctgtttcagcctcgaaagtagctggaattacaggcatgtgccaccacgcctggctaatttttctatttttttagtagagacagggttttaccatgttggccaggctggtctcaaactcctgacctcaggtgatctgcctgcctccgcctcccaaagtgctgggattacaggtgtgagccaccatgcctagccctggatttgtttttattgaggtgaaattcacatattgtaaaattcaccacttgaaagtattcaatttagtacactttacaatgtagcatttaatactcataatgtttcttttgtttggttttgagatgttctcactctgttgcccaggctggagtgcaatggcccgatcacagcagcctcaagagatcctgggctcaagagatccacttgcctcagctcctcgagtggttgggaccacaagtgtgtaccaccacacccagctaattatttttttgtagagacacgatctccctttgtttctcaggtgggtcttaaattcctgggctccagcagtcctcccgcctcagcctcccaaagtactcggattacagatgtgaaccatcacaaccgacctggctatttacgatgttatgcaaccatcaccaccatctatttccagaacatttctatccctgccaaaggaaaccctgtccccactagtgatcaatccccattccccttcccccacctccagcaaccactttctgtctctggatttgcctattgtgaacatttcatatcaatggaatcatgcggccttttgtgtctggcttttatcactcagcatgttttccgggttcatccacattgtactatgtgtcagaacttcattcctttttctggttgaataatattccattgtgtgcgtagaccacattgtgtttagccattcatccgcggatggacatctgggttgtttccacggcttggctatagtgaatcttgctgctaagaacacgtgtgttcaaggattactttgaaaacccacggagctgttaggtggccctagtggcgtggggctgttattcttctggagttacaggtggggatagtgagctcaagagaaagagactagcctggccaacatggtgaaatcctgtctcttctaaaaagaatacaaaaatcagtgagacgtggtgcaggcacctgtaatctcggctacttcggaggctgaggcagaagaatcacttggacccgggaggtagaggctgcagtgagctgagatcatgccactgcactccagcctgggtgacagagtagtgagaccctttctcaaaaaaaaaaaaaaaagaaaagaaaaaaaaggaaataagaaagaagggagggagggaggagaaaagaagagaaaaaaaaagagaaaagaaaagaaaggggggagggagggagggagagagagagagaaagagaaacaaagggaagaggaaggaagggagggagggagggagggagagagagagaaagagaaacaaagggaagaggaaggaagggagggagggagatgctccacttgggtcccacagtcaggactgagacggccagcactcaaaactgccccttgggccaggcacagtggctcacacctgtaaatcccagcactttgggaggccaaagcaggagaatcgcttgagcctaggagtttgagaccagcctgggcaacatagcaagatcccgactctacaaaaaaaaaaatatataaaaaattaaccaggtgtggcagtgtggacctctagttctagctactcagggggatgaggttaggaggatcacctgagcctgggaaatcgcggctgcagcgagctatgatcgcaccactgcactctagccttggcgacagagtgagatcctgtctcaaaaaaatatataaacactgcctcttagactccagagtccatgccgccctcaggccacatgatactgtgcccctcaagctcctgctgaagctctgcctgtctcacctaagccctcgtgcccctccaaggttgggcaaggccctattgaaaccctagtctgggccgggcgcggtggctcaagcctgtaattccagcactttgggaggctgaggtgggtggatcacgaggtcaggagaccaagaccatcctggctaatacggtaaaaccccgtctctactacaaatagaaaaaaattagccgggcgtggtggcgtgtgcctgtagtcccagctactcgggaggctgaggcaggagaatggtgtgaacccaggaggtggagattgcagtgagccgagatcgtgccactgcactccagcctgggtgacagagcaagactgtctcaaaaaaacaaaaacaaaaacaaaaagaaaccctagtctgatagcccaggctgtcccagccagcctgcccaaggcagcagaaattaactggcaggctggaggctggaatggccattgtcagggctaggagccagggatgaggactgggggacccaggggctggacatgaggagatctgggttaggtagggcttggctctctgtgtgactgcaggcaggtcaccttgcgtctgagcctgttttgtcatctgagactctgggagacagcccatccccacaccctaccacagtcctcaatcacgtccttcctctggcctgagggtgagccctcctttcctgctacccctggttctaaggtctaccaagacctcctttgacctggcatcaagcttggagcatgccatacatgggaggtccctggggccagcagagaggaagcattcccacagcacagtcactagaagccgaactgacagtctcagtaggaaatgagttatttgtcatgcggggtgtgcaagacatatcagtttccagatccatgttcccaaacagaggagagtctaaggtatttattccagcaagggatgtgggtacagtgcgacaaaaagattccacccagcgggggtgggaggacaagacgccccgtgtcctcaggactcctgagtctgcaactatggggaacttgatcctgacagaaggagaactttccggttcagatgatcaacaaccaggattaagctggcccagatagtcccaattcaggaaacttcctgaacatggggaggggcctagggagcccaaaggcaggtggtcaacttctatcaaacatgaaatgaggccgggcgcggtggctcacgcctgtgatccagcactttgagaggctgaggtgggaggatcacgtaaggccaggagtttgagaccagcctgggcaacagagcgagaccccatctctacaaaaaaaaaaatgtaaacattagctgggcctggtggcatgtgcctatggtcccagctactcaggaggctgaggtgggagaatcacttggcccaggaggtctagcctgcagtgagcgatgatcaaaccactgtactccagcctgggtgacgtggcaagaatttttctccaataataataataataataacaacaacaacagcaggccgggcacagtaatcccagcactttgggaggccaaggcgggtggatcacgaggtcaggagatcaagaccatcctggctaacacagtgaaaccccatctccactaaaaatacaaaaagttctccgggcgtggtggcgggcacctgtagtcccagctactccggaggctgaggcaagagaacggtgtgagcccgggaggcggagcttgcagtgagtaagtggagattgagccaccgcactccagcctgggcgacagagtgacactctgtctcaaaaataaataaataaataaaaaataacgaaataacaaaaaccccaaccctctccaggcccgtaagaccccctgcccacctctccctccagctccccctccctccccgtctgctactcaaacactccaagctgatttttatttttattatttttatcttttagacagagcctcactctgttgcccaggctggagtgcagtggctcgatctcggctcactgcaatctccgcctcccaggttcaagtgattctgcctcagcctcccaagtagctgcgactacaggtgcccaccaccatgctcagctaatttttgtatttttaataaagacagggtttcaccatactggccaggctggtcttgaacacctgacctcaaatgatccacctgcctcggcctcccaaagtgctgggattacaggtttgagccaccgcgcccggccctccaagctgatttttaccttggggacttctcatatactattccccctgcgaaaaggctcttcccccattggtggtttctctttaccccctggcctcactttttcagagccactccaacctcctggccaaagttgccaccccctccatcactccctctcctatctctctgttctgtagtcttcctagccctcatcacgctctgaaattactacttagatgttcatttgtttgtctgaccctctgtgggcagggccagatccaggctctgacccccgccccagcatgcagcaggcatgagggtggttgactaagtgactgggggaccactgctctgcctactttgatgtggatgaagactcctctttttttttttttttttgagacagagtctcactctgttgcccaggctggagtgcagtgggttgatctctgctcactgcaagctccgccccccgggttcatgccattctcctgcctcagcctcccaagtagctgggactacgggcgcccaccactacgcctggctaattttttttttgtatttttagtagagacggggtttcacagtgttcgccaggatggtctcgatctcctgacctcgtgatctgcccacctcggcctcccaaagtgctgagattacaggcatgagccaccacgcccggcctttttcttttttttttcttttctttttttttttgagacagcattgtccaagctggagtggaaagcctcgatctcggctcactgcaaactctgccacccgagttcaagcaattctcatgccttggcctcctgactagctgggattacaggcacccatcaccacgcccagctaatttttgtatttttagtagagacagggtttcaccatgttgcccaggctggtcttgaacttctgacctcaggtgatctgcccatcttggcctcccaaagtgctgggattacaggcgtgagccaccatgcccagctcagatgaagattctgatgggggtggaggtgtcatcccttgcacttgctcccaagacctcctagagtcagacgtgtcccccatgcagagtcaaatgctaggtctctatctctcagtgtctctgtctgtttcattctgactctcaccatcttttctttcccatctctgtctctctctcaatatctgtcttgcttactgtctctgtctctgtctctcagtcttattgcctctgtacttctgtctctttctccctgtctctgtctccctctgcctctgattctctcactatctctcttggctaccatctctctgtctctttgggtccctgactctctcaccatctctgcctcctgccctggcccggccagctgggggacaaggggtgacaagcagtcagggcgcccgctgcttgttttcccacccacgctggcagggagcccagcccagccgggccactgttcaggaatcctccagcctccccgctccagccaccaggcgcggccaccgccagcctctcctcccagcacattctgtcccaagcaaagagcgccagagatggggtgggggtgggggtgggagggggacgcattcctgctgagctccagttacaggacagcttgtcctggtggccccaccagcacaacctcctgatggctccccatcctgctgtggggttagaccttcctgaatgaagccaaagcccctctgccagttcgtgcccacctcagggcctttgcaccagccataccttccacctggcactctgtctccctagatctccccaagacctcctccgcctgcacatctgagacctcacatcaccttctcagcaagtcccctctgtccctaggcccgggcaccccaaattcccctcctgctgccccagtgcatttaatttcctggtcctccccatgtccctggggttacatattcacttgtttgttgatgtggtgtctattacaccaggtccccactgtgtcccagcaccctgaacacacagtaggtggcttagtgaaggtttttacaattgacatctattcctcccaaagctcagcccgcccaggctcatccatgtggatccacagttctgaccaccccacctctgcctcaccctgcctccgccacccctgcaccctaatgcagcaggatttcccaagcccccctgccttggcccagggagttatctccaccagatccacctttctgagcgaggagctgggtgcattgaggggcaggggcggctggagttcagatgcaccttttgagcgaggggctgggcctctctgtcgctgggctccaggcacagggcagtcatgatgtacacacacacgtgcaaacacacacgcacacacataagcctgtcagcaacatagaaacaccagccagtgaactcgggcacaagcagccgggcacagagtgttcaccaggtgctcacatgtggagtaccccaactcctaggaggatgcggttatggcctggatcctacaggtggggcccagacatgggctttgaacccacgccagggtatgcacaaacctatccaaacacacgcgtgtctgccctagcttccctcacccgggagtcacccccccaccccccaccttgtttttgatgttcaggaaagtccccagaaagcactgggcccgggcaaggggccaggaggaaatggtgactcagccggtggccatcagtgcctgccacgctgggctgggtggactgcgcggcccgatctgggaggatccacagaaaacaacaataaaagatgagggcgtgggtgcggggtaaaaaggactcagcccaagaatgatcagagaggggatggatccccctgtgctccaacacttcaaccctgctgggcctgattgacaagtggggaaactgagacacagggaacaagtgacttcgccaaggcccaccagccaagatggtacaggcaaggggatccctaagtccttaacacaggggtctggaggaatgtctacctgccctgcccttttttttttttttttttttggagacagggtctcactctgtccgtcaggctggaatgcagtggcatgatctcagctgactgcaatctccgcctcctgcctcagcctcccaagtagctgggattaccggcgcctgtccctatgcccaggtaatttttgtatttttagtagagatggggtttcaccatgttggccaggctggtctcaaactcctgacctcaggtgatctgcccacctcggcctgccaaagtgctgggattacaggcgtgagccacagtgcccggctccctgccccactttctgagacccagatccacttcctggtttcctgtgtggtcatgtgaccacacttggccaattggagccttttgttatcacaggcacagggattgggtcagggctgggcacgtgatcctgcctgagccaatcatgctacgagtttggagactccctggaagaaggcctagaagtaaggaaaaccatcttggacgcatgatgatggcagtggatcagagtcccaaggacactggtgaagatcagagcaggactcacacaacctcagatccctgtggagtcagggtggaaccagagggaaggctgaaggctggagggtcctgagaggccttgcagaaagagaggacattggagctggggctttgatggatgaagaggaactagggaaaggcatttcaagcagagggaacagcctgtgcaaccacagcaggcaggtgggagctaggcgtgtcctcagccaccccagtggccccatggggctggagcatagagaggcatctgcaaatgtgtttatttgtttattgagacggagttttgctcttgttgcccaggctggagtgcagtggcgcaatcttggctcactgcaacctccgcctcccgggttcaagcgattctcctgtctcagtctcctgagtagctgggattacaggcgcacgccaccacgcccacctaattttttgtatttttagtagagacggggtttcaccatgttggccaagctgatcttgaactcctgacctcaggtgatccacccgccttggcctcccaaagtgctgggattacaggcgtgagccactgcgcgtgactatttatttatttttttagatggagtctcactctattgcccaggctagagtgcagtggcacgatcttggctcactgcatcctccgcctcccaggttcaagtgattcttctgcctcagcctcctgagtagctgggattaaaggtgcctgccaccacgcccggctaatttttgtattttaatagagacggggtttcaccatgttggccacgctggtcttgaactcctgacctcaagtgagctgcccgcctcagcctcccaaagtgctgggattacagacgtgagccaccgtgcccggtttaaatgtgtttatttgtctctgtgctcaattctcccacctacaagccccctaagggcaggaccgggtttgctttgttggtggccagcagttgtccattaatgtttgtgatacaggtgaaccaggccacgtgaagccttgaaccggggctgagagccagcgctttcttttggggacacaaaacaggcaggatgggcagggggtggtgaatagaaaagattgggtacataaggcagaagagcctggggctttataggggtggcccctgaagcctgtgacccaggagggaccaggcccaggccacagtccaggcaggagagggcgtgtccccatctgtgaacccccacccccagaccctggccatggtgcttaggagggaggcagcatggagcttcgggtctgggctctgggaccacctcttcctccctgtgtgaccgtgggcaaacgacagcacccctctgagcctcagtttcctcatctggagcttgacttcactgtacgtcagtgtcaggactgggcacagagtgggtgcagcgtctgtggggcagcatgggggtgctgaggcagtgggtgaggggtaggctcgtctggaacatgccgttagcagttcccagcctctttgaaaacaggaaaccggctctcatgggagcccccagctgtgcttcctgagtctccgcgtgacgtgcgcgtgctggggcagtgtgggcaggcatgtgtgtgtttgcgtgtttgcaggcggcctggaatataggtggatccgcctgcgtgtgcatatgtgtgtgtgtgtgtgtgtgtgtcgggccgcacgtggcattgcccagaggcatgtacacacacaaccgttacctgtgctcgcatgtggagctatggatctcagccagtgtgggaagcagacagtgggttggttggggcacttttgagtctgggtctaagtgttaagtctgtgtgtccgtcagcagaggtgactggtgtgtgctgggactgacttgggccggcagagcctgtatcgtggccctaaggcctccgaaaccccaggtcagccctgattcagctgctgatgttggctttatttatttatttattttgagacagggtattgctgtgttgtccaggctggagtgcagtggtgccctgttagcccactgtggtctcgacctcctaggctcaagctatccttccacctcatcctcctgagtagctgggacaacagacacacaccaccacacccagctaatttttgtattttttgtagacatggaatcttactacgttgcccaggctggtctccaactcctgaactcaagcgatcggcctgtctcaggctccaaaagcactgagattacagacatgagcagtggccacttttttttttttgagacagtctcactctattgcccagactggagtgcagtggtacaatcatatctcactgcagcctcgacctcccaagctcaagtggtcctcctccttcagcctcccaaccatctgggaccacagacacaagccaccatgcccggctaacttttttttttttttttgagatggagtctcactctgtcacccaggctggagtgcagtggcaagatctcggctccctgcaacctctgcctcccaggttcaagtgattctcctgcctcagcctccagagtagctgggattacaggcatgcaccaccacatctggccaattttttatatttttggtagagacggggtttcaccatgttggccaggctggtctcaaactcttggagtgatcatcctgcctcagtttcccaaagtgctgggattacaggcgtgagccaccatgcctgtaattttattttttttattatttttatttttgtagagaaacataggtttccctatgtttccagggctgatctcaaaatgagatcctcctgcctcggcttcccaaagtactgggattataggagtgagccaccatgcctggtctacaacaggttcattgtcacctcagggccttttattttttttttcttttttttgagacagagttttgctcttgttgcccaggctggagtgcaatggcacaatcttggctcaccacaacctctgcctccagggttcaagcgattctcctgcctcagcctcccaagtagctaggattacaggcatgcgccaccactcccggctaattttgtatttttagtagagatggttgttctccatgttggtcaggctggtctcgaactcctgacctcaggtgatctgcccgcctcggcctcccaaagtgctgggattacaggtgtgagccaccacgcccggcacctcagggcctttctacgtgttgttctttctgcccagatagctcttcctctcgctcattacaaagcctgcacgttctcttcctgaagatgtcagtttaagcatccactccttagagacctttccacctcttcttgtttcttgtttttttgttttaattttttgacaagagtcttgcaggctggagtgcagtggcgtgatcttggctcactgcagcgtctgcctcccaggttcaagcaattctcctgcctcagcctccccaagtagctgggactacaggcatgtgccaccacagccagctaatttttgtggtggtgttttttttttttttcccgagacggagtgttgctctgtcgcccaggctggagtgctgctctgtcgcccaggctggagtgcagtggcacaatctcggctcactgcaagctccgcctcccgggttcacgccattgtccggcctcagcctcccgagtagctgggactacaggcacccgccaccacacccggctaattttttgtatttttttgtagagacagggtttcaccgtgttagccaggatggtctcaatctcctgacctcgtgatctgcccgcctcggtctcccaaagtgctgggattacaggcgtgagccaccgcgcccagcctaatttttgtgtttttagtagagacggggtttcaacatgttggccaggctggtcttgaactcctgacctccagtgatccacccacctcagcctcccaaagtgctaggattacaggtgtgaaccactgtgcttggctcctttcacctctttcacaaaagctgccctattctccctctcagttccttccaattccttgctttgcctttctcacagtttgtgattacaatgtattgacaggttcacggcctgtcttccacctcccctcggtactgggagctccaagagggcgggtcatagcatgcagtaggtgctcaataaatttactggctgggtgtggtggctcatgcctgtataaagcactttgggaggctgagatgggaggatcccttgaggccaggactttgagaccagcctgagcaacatggtgaagccccatctctactaaaaataaaaataaaaaaaattagccaggcatggtggcacacacctgtagtcctagctactggggagactgaggtgggaggattgtttgagcccaggaggttgaggctgcagtgagccgtgattgcaccactgcactccagcagaatgggaccctatctctaaaataaataaataatataaaaataaatgcagtatgctaaatgagagtgcctgcacaagatgcagagagccaggaatggggaggtggaagacaagggccctccctcagtagctgctcaattagtgtatgatggattaatgaagctcagagtaagaccttgacccactggtcctggactcctaaagaggagtcttctggcctcatccctagcctcctggccccagatcacactgtgtgagcagcccctggagcctgcttggcaggggaggaacagaagtccctgctcagttatttgcacactggcttctcccacgaagtcctaacatcgcaacttcaagtgccctttcctttcagaccccaggcctggaaaggtctttattttggccacctcagcccattgcatggaagggatatccaaggtcagaagcaatcccgtccctgtgtccaggttgagcatgtccctcctctgctcacacaccctccgtggctccctattaccctcaggagaaagtccagctcctcagctcagcagtcacagtccagcctgagtgtggcaagatcatttttcctttgtctaattctcagtcactctttgggtctcatcttggttatgtttcccagtattgaccattgacacagtcccaggacacactaactgctgtcagaaaccaaatgttcattgcattaatcttgtcagaacatcaggctgaatacgacttttattgttgttgttaagagactgtgtctggctctttcacccaggctggagtacagtggtgcaatcatggttcactgcagcctcaacctccgggctcaagcgatcctcccaccttagcctcccgagtagctgggactacgcacactaccacactcagctaatttatttattttttatagagatgaggtctcactctgtcgcccaagttggagtgcagtggtacagtcatggctcacgcagcctcgacctctgggctcatgcgatcctcctacctcagtctcctgagtagctgggactacaggcacacagcaccacacctggctaagtttttttttttttaattttttgtagagacaggtctcaccatgttgaccagcctggtctcgaactcctggactcaaacgattcctccccactctgcctcccaacgtgttggattacaggcatgagccgccacgcccattaggatatgactttttttgtttgttgttttgttttttgagacggagtttcgctcttgttgcccaggctggagtgcaatggcacgatctcagctcactgcaacctccgcctcctgggttcaagtgattctcctgtctcagcctccctagtagctgggattacaggcatgtgccaccacacccatctaattttgtatttatttttaatagagatggggtttctccatgttgatcaggctggtctcaaagtcccgaccttggcctcccaaagtgctgggattacaggcgtgagccaccatgcccggtctaggatatgacttttacagagtaaaaagactcacagtttgcattgcatgtgaccactgtggaccattgactattaacagagtattaaattcaatataaagaacagtgactgcccaagagcttagatcaggaataggcaaacattttctataaagggccagataggaaatatttgaagctttgccggctacacagtctcttttgcaattactctacgctgcggctgtttgaaagcattcatatacacaaataagtgagcatggctgtatcccaggaaaactttgttcatggacactcaagtgtgaatttcatgtaattttcacatgtcatcaaatagtcttcctctggtagtttttcagtcattttaaaatgtaggccaggtatggtggttcttgcctgtaatcccagtgcttggggaagctgaagtgagaggaccgtttgaggccaggagttcaagaccagcctgggcaacatagggagaccccctcctccatccttacaaaaagttttaaaaattagctgggatgcctgtagtctcagctattcagtaggctgaggtgggaggatcacttaagcctgggagttcgaagctgcagtgagctatgatcccgccactgcattctagcttgggtgactgagagagatcttgtctctaaaaaaaaggagggagccagggccggtcatggagaccatcctggccaacatggtgaaaccctgtctccactgaaaatacaagaaagaaagtaaaaaaaaaaaaaaacccaaactagctgggcgtggtggcaggcgcctataatcccagctactcgggagggtgaggcaggagaatcgcttgaacccaggaggtggaggttgcagtgaaccgagatgaaggcactgcattccagcctgggggataagagtgaaacccatctcaaaaaaaaaaaaaaaaaaaggagccaggagcggtggctcacacctataatcccagcagcactttgggaggctggggcaggcggatcacttgagaccaggagttctagaccagcctggccaacatggtgaaaccctgtctctactaaaaatacagtaattatctgggtgtggtcccagctactcgggaggctgaggtgggagattagcttgaacctgggaggcagaggttgcagtgagccgagattacgctgctgcattccagcctgggcgacagagtgagactctgtctcaaaaaaaaaaaaaaaaaaaaaaacggaaaaaaaattgaatactgttttggggtcatggttaaagctgaagtttaccaacccctgatgggtcataagtgtcatgatttgtgtttacagagtatcagaactttgtttaaagttaccagctgataaaatatgaggacaggtttatggctaacagggtttcatcattgacagatagcaagtatcaggattagtcttttttcacaaagtatcagaacacagcaagctctgatggctaatcaggtgtcagaacctgggtttaagtccaaccctgccttggggcccacggcaccgcggtaaccaccaactactgtccactctcaggatactgtttactaagtatcgagtgacaggctgatggcaaagtatcgggtcatggatgtcacactgtgagttgggcactgtgacagcgtctctagatgccagctgtttacagtgacaggagactggctgtttacaggggatgagtcagccccacttccagatacccaagtccagatggcgggtaggattggcacctctccaggtgtttacagggtactgaggtcctggcaagctgggcttctctcctgcggccacctctagccagggtggggaatgagtcccctgaaggctgtgggacccatgatcctggttagattctccttctgcttgtccctggctgtgctgcctcaggcacattacttaacctttctgggcctctgccacctcatctgtaaaatgggcatgatggtgaagccaggttgccagataaaatataggctactcagctaaatgtgaagttcagatcaatattgaatttggttttactgtaagtatatcccatgcaacatttgggatatacttatactaaaaaaaaattattcattgatgctatggtttgaatggtcccccaaagttcatatgtttgaaacttaatcctcaaagcagtcctttcaaccttgtcaacctgtcggcgcggcctctggtgcagtggcggcggctcctgttcctgccgcagctctctccccttcttacctccccaccagatcccggagatcgcccgccatggctttacttactgcggccgcccggctcttgggaaccaagaatgcatcttgtcttgttcttgcagcccagcatgccagtgcttcctccatgaatttgaaagacatattggctgacctcatacctaaggagcaggccagaattaagaccttcaggcagcaacatggcaagaaggtggtgggccaaatcactgtggacatgatgtatggtggcatgagaggcatgaagggattggtctatgaaacatcagttcttgatcctgatgagggcatccgtttctgaggctttagtatccctgaatgccagaaactgctacccaaggctaagggtggggaagaacccctgcctgagggcttattttggctgctggtaactggatgtatcccaacagaggaacaggtatcttggctctcaaaagagtgggcaaagagggcagctctgccttcccatgtggtcaccatgctggacaactttcccaccaatctacaccccatgtctcagctcagtgcagctgttacagccctcaacagtgaaagtaactttgcccaagcatatgcacggggtatcagccgaaccaagtactgggagttgatttatgaagactctgtggatctaatcacaaagctaccttgtgtcgcagcaaagatctaccgaaatctctatggagaaggcagtggtattggggccattgactctaacctggactggtctcacagtttcaccaacatgttaggctatactgatcatcagttccctgagctcatgcacctgtacctcactatccacagtgaccatgagggcggcaatgtaagtgcccataccagccacttggtgggcagtggcctttcagacccttacctgtcctttgcagcagccatgaacgggctggcagggcctctccatggactggcaaatcaggaagtgcttgtctggctaacacagctgcagaaggaagttggcaaagatgtgtcagatgagaagttatgagactacatctggaacacactcaactcaggacgggctgttccaggctatggccatgcagtactaaggaagactgatccacgatatacctgtcagcgagagtttgctctgaaacacctgcctaatgaccccatgtttaagttggttgctcagctatgcaagattgtgcccaatgtcctcttagagcagggtaaggccaagaatccttggcccaatgtagatgctcacagtggggtgctgctccagtattatggcatgatggagatgaattactacacagtcctgtttggggtgtcacgagcattgggtgtactggcacagctcatctggagccgagccttaggcttccctctagaaaggcccaagtccatgagcacagagggtctgatgaagtttgtggactctaagtcagggtaaaactggagactgggggaaagtgactaccagaaagtgaggaagcctaaataaaaagtatacttttgtttcagggggcctttaaagacttaagattaaattatatctgaggcactgataatatgtttgaggttaaaatataaattaagactttaaaagatgaaaaatggtcccttcttccctaatcagctcctttcccctgcctggtatgagttgcccatcacaggcatggtcctggaggatgaccaggactaatgcatgtggtatgagtaggtttggccccctcactatctctagagtgagaatctggctcctgtttccatggctcaaagccggttgcagagaatctgcagtcacttcggagctttagcttcttctctgccaagccctcaataagccagcaaaccaggactctgccccttctgtttccataggaatcatgttggatagtcagctgtaccaagccccttggccttcccatgcacacaaacacctcctagcaagacctgttggttagctggacatgctttggcaatttttttatactgccaagtgaccataaaggcatggcatttgttgtgactggcacccaatgtttgattttttttttaaactatccaattaaaattaaggtctgggagtgttctgtttcccattactttaatactcacccccctcccagactttctacacctgtttcacctcaggctgaggatgttctggacctccccctcttagtccctactagagacctctcaacagatctgtgggcccagtcattgggttttatcagtgcttaatgtgaactaagttttttacttccaacagaatacaagccactaccttctgacctccccaccccccaccaacccccagcttttaatatgctgtggggcatagaacagggactccggaatgaccagcatgatattttcagagtcttgtccctggggtattagcacctctttttgaacagagaattgattcaagattggacatggtctcctctgattatcaggtactggggctgagggcattaaaaatagtaagcctccttcctcgtcccctgcctcaagaaattgcctccttatttatcaacatctttttcctccctttccctgagagctcacagtacaatgtttgtttcagaagccccatttgcacaggttttcagcaactcagaatgctctacttctttttctttgagaaaggattgagatacgctcctgctgtgcccccatctttcctccaaactcctgcctgtgtttgtgtggatacccagtcccagaaccacactgttgagttggacacactgtaaacccctggctaactgtcaagtcatgatgcagacttcaggttgttctgtataaaatgcaaaataaatgttttaattaacaatgaaaaaaaaaatcctcaaagcaatagtgttgagaggtgggacctttaagaggtgattcgatcactggagtgggttcgtcattgtgggaatggatttgttataaaagtgagattggaggccaggcatggtggctcacacctgtaatcccagcactttgagaggctgaggtgggtggatcacttgaggtcaggaggttgagaccagcttggccaacatggtgaaaccctgtctctactaaaaatacaaaaatgagctgggcgcggtggcggacgcctgtaatcccagctacctgggaagctgaggcaggagaattgcttgagcctaggaggcagaggttgtagtgaaccaagatcgcgccattgcactccagcctggggtacagagtgagactctgtctcaaaaaaaaaaaaaaaaaaaaaaaaaaaagtgagcttggaggccgggcacagtggctcatgtctgtaatcccagcactttgggaggccaaggcaagcagatcacctgaggtcaggagttcaagaccagcctggccaacatagtgaaagcccgcctctactaaaaaaaaaaaaaaaaaaaattacccaggcatggtggcacatgcctttaatcctagttactcaggaggctgaggcaggagaattgtctgagccagggaggcggaggttgcaatgagccgagatcgtgccactgcactccagcctgggtgacaggacgagactccgtctcaaaaaaaaaaaaagaaaagtgagattgggctggacacagtggctcacactagtaaccccagcgcaaggcaggaggatccttgagcccaggggtttgagaacagcctgggcaacatagtgagactccgtctctacaaaaaatttaaaaattagctcagtgtggtggtatgcacctgtagtcccagctactcaggaggctgatgcgggaggatcgcttgagcctaggagttcaaggctgcagtgagttatgattgcaccactgcaccccagcctgagagacagagcaagaccctgtctctgttttagagacaaatacatgtctctaatatatatataatatatgaaaatatatatcatatatatagatacatacatgaatatatagtatatatttatagtatatctatgtatagtgagaccccatctctacaaaaaagaacaaaattagctgggtgtggttgtgtgggcctatggtcccagctactcaagaggctgaggcgggaggattgcttgagcccaggaggaagtcaaggctgcagtgagccaagattgcaccactgcactccagcctgggcaacaagagtaataacctgtctttaaatttttttaatgtaaaaataaataaaaatttaaaagaaaaggctggccaggtgccatggctcacgcctgtaatcccagcactttggaaggccaaggcgggtggatcgcgaggtcaggagatcgagaccatcctggttaacacggtgaaaccctgtctctagtaaaaatacaaaaaattagctgagcatggtggcatgtgcctgtaatcccagctactcgggaggctgaggcaagagagtagcttgaacccaggaggcggaggttgcagtgagccaagatcataccactgcactcctgggtgacagagcaagactctgtctgaaaaaaaaggcaaggcaaggcagggaagggcagggaagggcagggaagggcagggcaggcaaggcagggcaaggcagggcaaggcagggcaaggcagggctgtttggggcttcccttgctctctggcgtgtttctcttaccagatgatgcctgcaccacgtgataacacagcaaggagaccctcgccggatatggcccaatcttggacttcccagcctccagaaccacaagccaaataaacttcaattgtttatagattacccagcctgtggtattctgttaccacaaagcagaaagctaagacagttgtttctctgaaatttgaagttaacggggtgcctggatgtgtatttgctaaacctgatccccctgtgatgaagcctcccacatcacaaaaaaaatcttagaaatttaaaacttagccaggtatggtggtgcacacctatagtcccaaactcaggaggctgaggcaggagaatcccttgagcacagaaggtcaaggctgcagtgagccatgatcgcaccactgcattccagcctgagtgacagaacaagaccttgtctctgtcttttttttttttttcagacagaatcttgttctgtcgcccaggctggagtgcagtggtgcgatctcggctgattgcaacctctgcttcctgggttcaaatgattctcctgcctcagcttcccgagtggctgggattataggcgtgtgccaccatacctggctaatttttgtatttttagtagagacagggtttcaccatgttgagcaggctggtcttgaactcctggcctcgagtgatcagcccgcctcagcctcccaaagtgctggggtgacaggcgtgagccactgcgtctggccttcacctttctcttttatccttacttttatttttttttagaccggatcttgctctgtcgcccaggctggagtgcagtggtgcgatcgcagctcactgcaacctggacttcccaggtgcaagtgatcctcctgcctcagcctctcgagtagctgggactataggtgcatgtcaccgtgcaaggctaaaactttttttttaaagagatgggatcttgccatgttgcccaggctggtctcaaactcctgggctcaagcgatcctcctgcctcggcttcccaaagtgttgagattacaagtgcgagccaatgcgcctggccttatcgttgcttttgaggtgagaagatggaggtccagcatccagggccagatttgagcccactgggtcctttgtctctagccttagtagcactggccatgaaatgggactttagccaactgcaggtgaccaagagccaaccttgcatctcaggctgctgggcccctctgagctcagccccgggggcttgttgcaggaaggcccctcacttttatttatccccccacccccactgtatatgtaactgtctgaaactcactgttaaccccataaggaaaaatgtgctggctgggcaccatggcttatgcctgtaatcccagcactttgagaggccgaggtgggaggatcacttgaggtcaggagttcgagaccagcctgggcaacatggtgaaaccccgtctctactgaaaataccaaaatcagccgtacatggtggcatgtgcctgtaatcccagtgtctcaggaggctcaggcaggagaatcgcttgaacccgggaggcaggggttgcagtgagccgcgatcacacgactgcactccagcctgggtgacagagtgagaccccgtctcaaaaaaaacaaaactcattcaactgtactttattggatataagttacaccttaatacacttgactcaaaatttatgtatttaatattttattttgagaatgtgagaaaaaaaaaagtaacgtaagaataaaatccaggccaggagtggtggttcacacctgtaatcccagcactttgggaggtggaaggatcacttgagcccaggagtttgagaccagcctgggcaatgtagggagaccccccatctctacaaaaaaaaattttttttaattaaccaggtgtggcggtggacactcagaatgttacagaatggttcttgtgactaggcctttagtcacagctacctgagaggctgagatggaaggatcacttgagcccagaaagctgagcctgcagtgagccgtgatggtgccactgccctccagcctgggcaacggagtgagaccgtctcaagaaaaaaaaaaaaaagaaggccaggcgtggtggctcacgcctgtaatcccagcactttgggaggccgaggcaggtggatcacctaaggtcaggagtttgagaccagcttggccatcatggtgaaaccccatctctactaaaaataacaaaaattagccggacatggtggtgggcgcctgtcctaccagctacttgggaggctgaggcaggagaatcgcttgaacccaggaggtggaggttgcagtgagccgagatcacgccattgcactccagcctgggtgacagagtgaaactctgtctcaaaaaaaaaaaaaaaagaaaaagaaaaagaaaaaaattcaaatgctttatacaaagtcttctgttttggaaaactcgtgttattagttccagctctggaatgatgaagagtggtctcttgctacataccctagctatccagatgtgtctgttcatgttctttttcttgcttcaaaataaaacacatctgtgttttaagttacaagtattaacttgctatattcaaagaattcatgaaacatatgtgagcataccattaaagaaacacagaaaaaaaggagaaagcagtcaatttatttatttattatggagacagggtctcagtctgtcacccaggctggagggcagcggtgcaatcatgactcactgcagcctcgacttcctgtcctcaagcgatcctcccgccttagcctcccaaagtgctgggattacaggaatgagccaccacacccagccttaaagcagtcagtttagaagtggagatagtatgggttacagccatactgaatcaggcaccatggctccggttccatgcgtaatagccctggaactatcaatctggataaaacagtcctttttatttattttttttggtagagatgggatcttgctatgttgcccaggctggtcttttttttttttttttgagatggagtctcgctctgtcgcccaggctggagtgcagtggcatgatctcagctcactgcaagctccgcctcccaggttcacgccattctcctgcctcagccgccccagcagctgggactacaggtgcccaccaccacgcctggctaattttttgtatttttagtagagacggggttttaccatggtctcgatctcctgaccttgtgatccgcccgcctcagcctcccaaagtgctgggattacaagcatgagccaccacgcctggcctgcccaggctggtcttgaactcatgggctcatgcaatcctcctgcctcagcctcccaaagagctgggattacaggtgtgagccatggtgcccatcagtctgagacatacagatgcgtgcctcagtttcctcacctgtacaatgaggttcatcacccccttgcacatggggtcattgtgaggacagggtgggttgggcctggtgcagtgggcattgtcagagcgggagaaataagtcccaggttggatttagtgtcttttgtcttctcagctgtgttcatttgttttacactggtgtgagccaacctaaagtctcactctgacatcttgtcatcatccaaatggccaactgctaatcatcaagcacttccctgccagcgcagcgaggcagcagcagtgatgtcccaggatcagccagttcctggtcacatctcattgcacacctgcccctttgaaatgtccagtcctggggctgcttagattctagaacaatcttgggagcgaggagcccaggccagggtggcatcctgtggtcttgatcccaataccatgctgttccagggtcacttggaagctggactcagtatcccagtcggggagctggtggctcaggcaaagggacgcagaggagccctgttgcagactcagcaatgtggccctaagggagctgggtgcagcgcagtggcccacgcctgtcatctcagcactttaggaggccaagtgggaggatcacttgagcccaggagttcgagactagcctgggcaacatggcgaaacctcgttgctacaaaaatacaaaatagagccgcgtgtcgtggttcgcccttgtaatcccagcactttgggaggctgaggagggtggatcgcctgaggtcaggagttcgagaccagcctggccaacatagtgaaacccccctctctaataaaaatacaaaatattagttgggtgtggtggtgggtgcctgtactttcagctacttgggaggctgaggcaggagaattgcttgaacccaggaggcggaggttgcagtgatccaagatcatgccactgcactccagtctgggtggcaaagcgagactccatctcaaaaaaacaaaaaaattagccaagcatggtggcatgcacctgtgatcctagctactcaggaggctgaggcaggggaatagcttgaacctaggaggtggaggctgcagtgagccatgattgcgccactgcactccagcctgggagacagagtgagaccatgtctttaaaaaaaaaaaaaaaaaaaaaaaaaaaaaagcagaaatagcagctgtgagaaaatatagtagaatcaggaacgtagtggagaagaaatcatctggtgccatggaagttcaggacagacccctgcatcaagaaagaggagactgtgccactgcactccagcctgggcgacagagtgagactccatctaagtaaaaaaaaaaggttgggcacggtggctcacgcctgtaatcccagcactctgggaggctgaggtggatggatcatgaggtcaggagatcgagaccatcctggctaacacggtgaaaccccgtctctactaaaaatacaaaaaattagccgggcgtggtggcgggtgcctgtagtcccagctactcgggaggctgaggcgggagaatggcgtgaacccaggaggcagagcttgcagtgagccgagattgtgccactgcactccagtctgggcgacagagcaagactctgtctcaaaagaaaaaaaaaaaagaaaagaaagaggaataaaggaatcaaaaagtgtttccaactctgcagggaaagacacaaactgtattaagagagattaatgatgcaagatggatgtccaggacacacctgctgggagccacagtggcttaactccactgtctgtggggacttggaggtcatggcaagcacagcagtgaaattcctgcaccaggagggggcccgggccatggatgaggagttgtttcatgagtaccagcatggcccaacttacagaactggctggactcagctgttccactgtcattgccaaggcatatcctcccatatccatgtcccgatcatccatggcccagggaataatggagaaggtagcctgctctgtgcttgacacctcaaacattttggtcaccagccaatcatctttgaccccaaaagacccaacaagccactctacactatgcttggtgacccactgtcaggaaaggggcattcttttgcttggtgaagtgcccccagagcccacgctgatcaatgagctgtatgggctgggggtggatgccatctttggcttcagcttcaagggcaatgtttgaaagccattctgtaacattctgagtgtcctgaatagactcactgtgccactgccaatgctgacattcccttgggatgggacatggagaaggaaaactccggagggatccagccagacctgcttctccccctgatagcacccaaaaagtctgaaacctagtttacagattgctaccactacttgaggggttgttgactaccacctgcttgggaaaagaagtaccagctaaaacctgccattgtaccctaaccctgagtatgtctcatcatctgcagtgaaggaaggtggatggacattcttcccaataaagacttagtgcctctgtctcccagaaggcacacacacatacacacacacacacacacaatgcggagagagactactgaggctaaagagatggtaggcataccatgttcatggacaggaaggctgaggttcataaagatgctgattaactcatttaacagtcccaacccaccagaaggaaccaatcttgcagagaccttgatttcagacttctagcttccaaagctgtgacagaataaacatattaaattaatttccccctctgtagtttcaacacagtcccaatgaaagtcatgtcagagctttccctggaactcaatatgataaccgaaacatttaactggagcagcagagggttgcaaatagttgggacattactgcagaagaacagggcagtcctacctgacataccagatattggaaccatgacaaagcctgtaattaagtcagcaaaatactggcacagaaagaagcacattgaccaatggattagaattaaatgcccacagacagccctatgcaggtcaggaattttgcttcaagaaggagagagtctgtcccagcagtggggaggggaggctatcccataaaaggatctgggaaatgggagaccatgttgaaaacaatattggttctctacttcacacaatatgcaaaacaaaactccacatgggttaaggagttacacacaaaaatataacaaaattaacctttttattttatttttttagacagggtcttgcttggtcacccaggctggagtacactcactgcagcctcaaacttacaggcgcacattaccacgcctgactattctttttaaattttttttgtagagacagggtcttgctatgttgcacaggctagtcttgaactcctggtctcaagcgatgctcctgcctcagcctcccaaagtgctgggattacaggcatgagccactgtgcctggcccaaaagaaagctttaatgtcttggtggtaaatataggtgaacttgagggcaaggcttggcggctcatgcctgcaatcccaacattttgagaggccaagaggggaggatcaattgagcctaggagtttgagaccagcctgggcaacatagggagactccatctctacaaaataaaatttaaaaattagctgagtgtggtggtgcatcctgtagtcccagctactagagagggtaaggtgagaggactgcttgagcttggaaggttgaggctgcagtcacccatggtcacaccactctactccaggctgggcaacaaagtgagaccctgtctcatagaaaaaaaaaaagagagagagagagaaaagaaaatattggcgaacttggggtaagaaaagactttccacataagagccaatgggcattgtctatataaagaaaagattggttaatttgcatatattaagggtaggactttgtattcatcaaaaggcacattgaaggaagtgaaaagacaagttaccagccagccacagtggtccacatttgtaatctcagagctttgggaggctgaggctggaggaatgcttgagcccaggagttctagaccagcctgggcaacatagggagaccccatctctacaaattaaaaaattagctggacatggaagtgtgtacctgtagtctcagctactcaggaggctgaggcaggagaattgcttgagcacaggagtttgaggccgcagtgagctatgatcatgccactacactccagcctgggccacagagtgagaccctgtctccaaaaaaaaaaaaaaaaaaaaaaagaaaaaggccaggtgcagtggcttacacctctaatcccagtactttaggaggccgaggcaggcagatctcttgagttcagtagttcaagaccagcctggccaacatggtgaaaccctatctctactaaaaatacaaaatttagctgggcatggtggcgggcacctgtaatcccagctactcgggaggctgaagcaggagaatctcttgaatctgggaggcggaggttgcagtgagccaagaccacgccactgcactccagccggaccacagagggagttttcacctcaaaacaaaacaaaaagactagttacaaattaggggaaggtatttgcaatatactcaacagatggaggaatactatcaaacctacataaataattcctataatgccatccaggcacggtggctcacgtctataatcccagcgctttgggaggctgaggtgggtgaatcacctgaggtcaggagttcgggaccagcctggccgacatggtgaaaccccatctctactaaaaatacaaaaattagccaggcatgatggcaggcacctgtaatcccaactactcaggtggctgaggaaagagaatcacttgaacccgggaagcggagattgcagtaagctgagatcatgccactgcactccagcctgggtgacagagtgagactcagtctcaaaacaaaacaaaaagacaagttacaaattaggggaagatatgtgcaatatactcaatggatggaggaatactgtcaaacatatataaagaattcctataatgaacaccacaaagaacacagagtaggaattcacgaaggaggaagcacaagtggcaaagagatgatcaacatttactgaggatcaggaagatgcaaattaaaacaccaggtagatgccatttgattggcaaaagctacaaaatccaccaataccaagtgattccccaagatgtattcatgagaaactcacaaatggctgtgggagggtgcatgctgctgacacttgggaaaaacctctggagtttccaagtgtctctgagtccacaacccacatgctccagaaatccgcaaagagaaataccttcctgctcctggccagagtgccggaggtaagcactaccctctcagacctggaggacctgcaggaggacaggtgagtttttacttggggttggagagggggctgtgtaagtttcctggggctaatgtaacaaatttgcacaacctggggggctccagacaacagaaatttattctctcccagttttggagagaagtctgaaatcaagataattgcctgggttgattctttccagtggtttgagatgtttaaatgagctaatacctggtacacactaaacacttagtaccagtgtactgggagaataataaaatgcaggaatacagcaaagcataaaataagcattgattgttgattggatgagtgattaagactaagtgaagggccaggtgctgtggctgatgcctataatcccagcacttttggaggccgaggagagcggttcagctgaggtcaggggttcgagaccagcctggccaacatggcaaaaccccatctctaccaaaaatacaaaaattagctgggcgtagtggcgcatgcctgtaatcccagctactcaggaggctgaggcaggagaattgcttgaaccctgggaggcggaggttgcagtgagccgagatcacgccactgcactccggcctgggtgatggagtgagattgtttcaaaaaaaataaaataaaataaaaaataagtggaggctgggcgcagtggttcatgtctgtaatcctggcactttgggaggctgaggcaggcagatcacttgaggtaaggaatttgagaccagcctgggcaacatggtgaaaccctgtctctactaaaaatacaaaaattagccaagcgtggtggcgtgtgcctgtagtcctagctactttggaggctgaggctgcagtgagtttgaacctgggaggcagaggttgcagtgagctgagatcgcgccactgtactccagcctgagcgacagagcaagactcttctcaaaaaaaaaaaaaaaaaagactaagtggagatgagggttcagtgcacccccatctcctggccctgctgcccatgagccagaccctgagctgacagattggtgcccatttcctcttatggattgatacggggctcttacctctgggtttgctcagcccagcagcaggcagtcagagccagaagttgtttgcaaaccgaaaccggtctgcggcttgggccacctacttgtgaaaccagctgtcgctgtttttcctccctgtgagaaagtcccccagtaaagctgcgcgggggaggagaaggagggtggaggagggccgagtagcttcctgggagaccttggggtgtggaggcgctgctctggactttggtttgcccatctgcaactgggcaccatggggaaaggggattgcaggctcctggctggggagtttggatttggggatgctggacaagtgacttcacctctctgagcctcagtttccttatctgtgaactagtgagaaacacatggccaccagagctgctgcaaaggggcatgtccctctcttcattcaggccttggccccaaatgtcgcctattccaggaagccctccaggactgcctgatcaggaaacaccctccctctgctgcatctggtcatgtattctactttattcatcacacttttcaacacctgattccacattacagatgcatcgcttcaggtgcataatgtcctctgggtcccacctttgtccccagaccatgagtcctacaagggcaagattgctctcagttgtccccggctgtgtccccagaccacagcccagggcctaaagcacagcaggcatctggggaaacatttctttttatcagcataagattattatctgtgagcacactcattaagccccggctgtgtacaggagccagcgacaccaccatgaatgagatacaaattcttttttttttctttctttttttttttttagacggagtctcattctgttgcccaagctggagtgcagtgtggcacaatctcagctcactgcaacctccacctcccaggctcaggtgattctcccgcctcagcctcccaagtagctgggattggtagctgggactacaggctcccaccaccacacagttaatttttgtatttttcagcagagatgagatttcaccatgttggccaggctggtcttgaactcctgacctcaagtgattcgctcacctcagcctcccaaagtgctgggattataggcatgagtcaccgcgcctggcagagatacaaattcctgatggcagaggagggagagagagtgtgggtgacgatgacaattgaactgagacccaaaggaggtaggggagacatatgggcgtctctgggaagatggtccccgggaaagcacagcctttagacaggccccgaggcaggagcctgtctgactcaccggaggagcttggaggaggctgaggtggcctaagtcgattaagcagggtggggagggaagaggcgatggtgccgtgagaccaagcagggccttgaggtctggggggagaactttggcttttactctgaggaaggtgggagccacagaggcttctagacagaagaaggacaagccggactcaggataccagggtgggggtatctgtgggggataaagggagaagcgaggagaccacagaggggtgccactgctggtcctaaggagcaatgatagtctggaccagggagaagggaccttcatgagaagggatcggatgtgggagcaattttgatggtggatgggtggaggaagaagattcaggggcaccagtgtgagcccatctcacaagggaggaaactgagactctggggacagagggatctcagtaaaggagaaactggaagaaaccagtggaacgttcagaggtgaccagggtccaggagggagcccccgcacctccctgagtcacagagattgccagcttcctcctgatgcaacctgaccttccatctctctctttgtttgtttgtttgtttgttttgagacagagtctcactctgtcacccaggctggggtgcagtggcacgatccctgctcactgcaacctctacctcccatgttcaagcaattctactgcttcagcctccaaagtagctgggattacagatacacaccaccacactgggctaatttttgtatctttagtagagacggggtttcgccatgttggccagggtgatcttgaacccctgacctcaagtgatctgcctgtcttggcctcccaaagtgctgggattacaggcgtgagccaccgcacccggcctctctttgattttatctctataatttccatccctgtcagagggaagaggctccaccacctacagacaccgataggcctgactcggcttcccacagattcatttactaaccccaaaccccaagacatgggtaccaacactgttttacagatggggaaactgaggctcatataggcgaagtggttttccaggcagaggcaggattagaaccctgagccttggctctagacccctgctcttgagatggcactctgctgggggtcatcaaacattccaccccgagatgcattattcctttcccagcttctgagaacttgggcttgggtgggagccccctgcaacgtgctaaaaatccaggtttaggcatttttttaatgtaaaaaaatatttacttatcatccaggcacggtggcttacgcctgtaatcccagcactttgggaggccgaggtgggcagatcatttgaggtcaggagttcaagaccagtctggacaacatggcgaaacctcgtctctactaaaaatacaaaaattagccaggtgtggtggcgcacgcctgtaatctcagttactacagaggctgaggcaggagaaatcgcttgaacccaggaggaagaggttactgtgagccgagatcctgccactgcactccagcctgggcaacagagcaagacttcatcacaaacaaatgaacaaacaaaacttatttattttctagaaacagggtctcgctctatcacccaggctggagtacattggcatgatcatagctcattgcagcctcaaactcctggactcaagcgatcctcccacctcagcctccctgagtagctgggactacaggcacctgccaccatgcccagctacattttttcaattttttggagagacaggatcttactacattgcccaggctagtctcgaactcctgggctcaaacaatcctacagcctcggcctcccaaactgctgggattacagccttgagccaccaaccttggccagatttagatttgtatggccttacgtttctgagtttgtaagattatatacgattcatttgttcattcatgttcattcattcctggccacatccaggtgcctgccttatttggggtaatgctcgaggccccagcttgggaaggtccaggctggatagagatattcttgttcccacagggtcaaggctaggctggagggaggtacccagggctgggggtccccagcgatccaggaagtggggggcttgctgaagaagggaacctcatgccaaaggcctgggtcccttcctcctcatgcccaccacccccatgacgaaagccagagaggatgagggcaatgtggggcttccataccccaaatatgatcctggtgcctggtatggaaccccagagcctgccaccgtgtctctagtgatccttgaaaagttccagcatattttgggagtactcaacaccaacatcgatgggtggtggaaaatagcctttgctatcactgccattaaaggtgtggatggaagatacgcttatgtggtgttgaggaaaacagacattgacctcaccaagagggcgggagactcacggaggatgagatggaatgagtgatcaccattgtgcagaatccacagcagtacaagatcccagactggctcttgaacagacagaaggatgtaaaggatggaaaatatagccaggtcctagccagtggtctggacaacaagctccgtgaagacctggagcaaccgaagaagattccggcccatagagggatgcaccacttctggggccttcatgtctgaggccagcacaccgagaccattggccgccatggccgtacctgtaccgtgggtgtatccaagaagaaataagtctgtaggccttatctgttaataaatagtttatggccgggcgcggtggctcacgcctgtaatcccagcactttgggaggccgaggtgggcggatcatgaggtcaggagattgagaccatcctgctaacacggtgaaaccctgtctctactaaaaatacaaataattagccaggtgtggtggcacacgcctgtagacccagctactctggaggctgaggcaggagaatctcttgaacccggaaggcagacgttgcagtgagctgagatcatgccactgcactccagcctgggcgaaagagcaagactgtcgcaaaaaaacaaatagtttatataccaaaaaaaaaaaaaggaagaggaaaaaaaacctgagcccaaagcctagccctaaacgtcacctccggtccccattcccggcttgcaccgggcagcagccaacaccacggggaagtggcctgggcttcccgccagactgcctgctggaaaactagctctgggaggtgggggtgtcaccatccagtatgtgagggtggaaccttctgggctgaccatttatgggacaggcccctagaatgggaggcccaggacagccggagagccacagagcccagcagctggaccagggtgaccatgatgccactggggctgggacacctgcacgagactcttcaggaataagcccctatttccccacctaaaaatggaagtggggccgggcacagtggctcacgcctgtaatcccagcactttgggaggccgaggcgggtggatcacttgaggtcaggagttcgagaccagcctgaccaacatggtgaaaccccgtgtctacaaaaatacaaaaattagccaggcatcatggtggggggcctgtaatcccagctactcaggaagctgagggaggagaatcacttgaactgggaaacagaggttgcagtgagcagagattgtgcccctgccctccagcctgggccacagagcgagactctgtctccaaaagtaaaaaaagagacaaataaacagagaaacaaggagagacagaggcagtgagagacagagacacagagagatacacagggagacacagagacaggtgaaacagagacagagagagatgagacagaaacacacagagagacagacacagagaaacagggaaagagagaaagggagacacagggagacagagacagagagacagaagtgagacagagagatgagacaaagagacagagagagagacagggagagagatgagaaatgagataaagagaaagatgacacaaatattttgggaggctgaggggggaggattgctggaggccaggaattagagaccagcctgggcaacataatgagacccttatctctacaaaaagaaaaagaaaaaaaaagatggcaaagaaagagacaaggagagagacagagagacaaaacacaaagatagagagagaggggcacagggagaaagagacaaagaggggcaagacaagccaggtgcgatggctcactcctgtaatccaagcactttgggaggccgaggagggcggattacctgaggccagagagttcaagatcagcctgaccaacatggtgaaaccccgtctctactaaaaatacaaaaattagcatagtagggtggcgcacgcctgtgatctcagctacttgggaggttgaggcaggagaatctcttgaacctgggaggtggaggttgcagtgagccaagatcacgccattgcactccagcctgggcaatagagtgagactctgtctcaaaaaattaaaaaaaaaaaaattaaaaaaaaaaataaaagcaagtcagagaaatagagacagagagacaggaagagatgagaaatgagagatagggagagacagggagggaggaaggaaataggaagctgggggtggggccaggacacagtggctcatgcttgtaatcccagcactttgggaggctgagatgggaggactgcttgaggccaggaatctgagaccagcctgagcagcagagtgagtgctctttctacaaaaaatacaaaaattagctgggcttggtggcacacacctgcggtctcagctacttggaaggctgaggtgggaggattgtttgagcccaggaggctgcagtgagctatgatcacaccactgcactccagcctctgggtgacagacagagacagtgtctcaaaataaaacaaaatgaaaattagccaggcatggtggcgggcacttgtaatcccagccactcggaaggctgaggcaggagaatcgcttgaacctgggaggtgaagattgcagtgagccgagatcgcaccagcctgggaaaggagagcaaaactccgtctcagaataataataaaataaaataaagatcactcctgtttagttggttaagaagaaaaaaaaaagaggttaggggtacaagaccagccactgggagaagagggccctcctacccggccagaggagccccctgcctggagctcctgatcccagcacataaggtttaatattattaaaggtgatgatatcttggagggttgggcacctcgttcacctagctccttctcacctctcataggcctccccggggggttaactaccccattgcaccgatggggaaactgaggctcggagaagccctggctgcacaggcagttggaagcagagccaggactcggctggatccttgagacgtttgtcgactgactgtgtgacccttggcccctccagtctccaacccggaggagaaacccgcccctcttcccgtcccccacccccagcccgcccggcgggtgttttttttttcctcctcctgggtattttggtttcggcaggaaccgccccggggagcaggcggttcccgctggcagggtcagcccagggcggggacgggagccaggagcagctccaggccagggaaggtggggaggactcggggaggaagcctggccgtggccccgaccactgggaccaggcaggtcgcgtccccatcccaatcttccggtgcctcagtttccccacctggaaagcggggctctgcgtgatcgcggcacagcccgtggaggcgcgtcgcgcatggggccgggcggggtttccacgtctccgccaaggttctgtccactcagttattaaacattgatggatcggggacagagccagaggccagtgccccaaaccggggcgggaggtggggaggggaggaggggggagggacaggccagaggtgggggctgggggcggggaggatggggagaggtgcccgcaagaggggtttatcaagatcaggaggattctcaggtagcacacccaaagcacaagccagcaaaggaaaatagatcaacccgactccacacaatgcaagacttttcttctgcaaggccactattaagagaggcctggcacagtggctcacacctgtaatcccagcactttgggaggttgaggcaggaggatcgcttgagtccaggagttcaggatcagtctggacaacatagtgagatgagaccttgtctatacaaaaaatatttaaaaattagccaggtgtggtggtgtgtgcttgtatagtcccagctactggggaggctgaggtgggaggatcgcttgaacccaggagttcgaggctgcagtgagctatgattgcgttgctgcactccagcctgggcaaaagagggagactctatctcaaaaaaaaaaaaaaaaatgacaacccacagaatgggagaatatatgtgcaaattttgtatctgataagggtcaaaaagataaataatccagtcagacatggtggctcacgcctgtaatcccagcactttggaaggctgaagcgggcagatcactcaaggtcaggagttcaagaccagcctggccaacatggtgaaacattgtttctactaaaaatacaaaaattatccgggcatggtggctaacgcctgtaatcccagctacttgggaggctgaggcaggagaatcgcttgaatctgggagacagagattgtggtgagccaagataacgccactgtactccagccttggcatcagaacatcaaaaagaagaagaaggaggaggaggagaaggagaaggataagaagaaaaaggaggccaggcgcagtggctcacgtctgtaatctcaacactttgggaggctgaggtgggagggttacttgagctcaggagttccagaacagcctggccaacatggtgaaactctgtctctagtaaacatacaaaaattagccgggcatggtggcaagagcctgtaatcccagctacttgggaagctgaagcacgaggatgatcgcttgaacccgggaggcagaggttgcagtgatccgagatcacgccactgcactgcagcctgggtgacagagtgagatcctgtctcaaaaaaaaaaaaaaaaaaaagaaaagaaaaaggaaaatagcaagtgttgatgaggatgtggagaaatttgaacccccatgccttgctggagggaatgtgaaatggtacagctgacgtggaaaactttggcagatcttccagaagttaaacacagaattaccatatgactctgtgattccactcctagatgtatacggagaaaactgaaaacaggtgtttacgccaaaacttgtacacaaactctcagagctgcgctatccacaatagccagaaaatggaaaccaccgaaatgtccattgatggctgagtggataaataaatagtgacacatccacacaatggaatgctattcagccatcaaaaagaacgaaaccctgacacacactataatgaggatgcgtttcaaaaacatctgagtttctttcacaaaagaacagacagaaaggccacatattgtatgatttcattgatatgaaatgcccagaacaggcaaatccatagagacaggaagcagattagtggctgccaggggctgggggaggggaacggggagtggctactgatggcacaggttttctttttggggagatgaaaatgttctagaattaggtatgagtgatggctgcacaaccttgtgattgtacaaaaaccactgaattgtacttttttttttttttttttttgagacagggtctcactctgtcactcaggctggagtgcagtggtgcaattacggttcactgcagcctcaacctcttgggctcaagtgatcctcctgcctcggcttctcaaaatgctgggattgcaggcatgagccaccacgctcagtgtcaactgtacactttaagagggtgaattgtatggtgtgtgaatgtatcttaaaaaaggaggaatggccgggcgcagtgactcacgcctgtaatcccatcactttgggaggccaaggtgggcagatcgcctgaggtcaggagtttgagaccagcctggccaacatggtgaaactccgtccctagcaaaaatacaaaaattagccatgcatgcttggtggtaggtgcctgcagtcccagctactccagaggctgaggcagaagaattgcttgaacccaggaggtggggttgcagtgagccgagatcacgccactgcactccagcctcctgggcgacagagtgagattccatctaaaaaaaaaaaaaaaaagaggaataaggctggggctcagtggctcgtgcctataatctcaacagtttgggaggctgagacaggaggattgcttgagcccaggagttcaagattggtctggacaacatagcaagactctgtttctactttaaattttttttttaaatgaaagaaatgagttaaaaaagagagagagagaaatgggcagagggcagagttggaagaagggccttcctgggcagagggcctggcatctggggcacagataataaagtatcaggggccaggccaggggctaccctgagtccaggggtcatctcctgcagctcatggttcccagaaacctgacacctcagtcccatcccggctgaagggcagaggcagagacaacatctgtttctgaccaaacccagaggctactggagagatagagaaggaaggtacctgggaaggtaaactgaggcagcctatctctctgatggagacacgcttcccacccagtaggtgggagccatggagaagggaaaagatggatcaggaaagacagagacagaggaggggaggtgggaagaggggcaggggctctggagaggctgcctgaccacatccattttatggaccagaaaactgaggcccacaagatgaatcacttactcccagctgaactgcagccagaataaactctgaacctctcacccgtcaggacctgactctccagctccaggaccccacaacccaagaataaaaccctagcccgccaggcgcggtggctcacgcctataatcccagcactttgggaggacggggcaggcggatcacgaggtcaggagatcgagaccatcctggccaacatggtgaaacaccgtctctactaaaaacagaaaaagattagccgggcatggtggcgggcgcctgtagtcctagctactcgggaggctgaggcaggagaatggcgtgaacccggaaggcagagcttgcagtgagcctagatcgcgccactgcactccagcctgggcaacagagcgagactccatctcaaaaaaaaaaaaaacctagcccacgggtacagtggctcacgcctgtaatcccagcacattgagaggccaagacaggaggatcacttgagcctaggagtttgagatcagcccaggcaatatggtgagactctgtctctacaaataatcaaataaactaagctgagcgtggtggcacgtgcctgtggttctagctgcacaggaggctgaggaaggaggaacagttgagcccgagaggtcgaggctgcagtgcgctgtggtcacgccactgcactccagcctgggcgacagaacgagaccccatctcaaaagaaaaaaaacagctctggtccatatgcccccagcctcacgtgggctacaacctcttcccccatcccccgtccattccccaccagcaacctcagggcctttgcactccctcttctggcccctctttaccaccttggtcctagcattgcctcctccaggaagccctccctcactggctactcctcacatccccactcatcactcttacggtttctcataactctctgagtgataattagattagtgtctgccttccccacccagctaagagccccttatgaccaggaagatcctgacttgtgcaagatggggcctggtatacagtaggcactcaatgctggctttttttttttttttttttgagacagggtctcaccttgtcacccaggctggagtgcagtggcgcgatctcagctcactgcaaccttgacctccccaggttcaggtgattctcccacctcagccctcagcctcccaagtagctgagactacaggcatgtgccaccaaacctggctaatttttgtatttttagtagagacggggtttcaccatgttggccaggctggcctcgaactcctgagctcaagcgatcggcccgccttggcctcccaaagtgctgggattacaggtgtgagccaccgcgccggaccctgatttcttaaatgaatgaatgaaactgagctgtgaaatgggggctaacaccatcctgactcctggagctgctgggagaagctgaggcaatggctgctctgaggagccctggagtaatagttgcatagcagttgctcaataaataccaggccagggcccagctaagcaaacttgctgggcccattgagaaaaggactccaaatcccttcctattttatagacgggtaagcagaggcccagaaagaacctcctgttggtcattttctagggacagaagaaggactcaaagtggcttcatcaaacagggaactgaggccgggtgcagtggctcatgcctgtaatcccagcactttgggaggccaagtcaggtggatcatttgagctcagcagttcgagaccagcctgggcaacatggcaaaaccttggcaacaaggcttgagcctgaggctgaggctggaggatcactcgatcctaggaagtggaggttgcagtgagccaagatggtgctactgcactccagcctgggcaacagagtgagaccctgtctcaaaaaagaaacaaaaaataaaaaaaaatatttatttatttatttatttatttatttattttttgagacggagtctcgctctgtcgcccaggctggagtgtagtggcacaatctcggctcactgcaaccacccccttccaggttcaagcgattctcccgcctcagcctaccaagtagctgggattataggcgcttgccaccacgcccagctaatttttgtatttttagtagagacggggtttcaccatgttggccgggcttgtctcaaactcctgacctcaggtgatcagcccgcctctgcctcccaaagtgctgggattacaggcgtgagccaccatgcccggcctaaaatattttttaaaaacaggaaccagatggaaaatattgggtttcaggtatggctggatccaggaactaatgcttcatctcggtgctgctgtcctccctgcaggctcctctctcagacaggcatccccacggtaggaaggaaagaggctccaagctccaggcttccctctgtccagctcagtctcccgctagtggaagcagggtgtgcatcttccccatgcactctggcaaaagtcccagctgctgccagtaaacattgcctgtctcctacttctcgcacccaagggactgtgcataggggtgggtttgcagccaactccaggggcctccagggctcacacctgcaatcccagcagtttgggaggccgaggcgggtggatcacttgaggtctggagttcaagacgagcctggccaacatggtgaaaccctgtttctactaaaaatacaaacacattttagctggtcagggtggcgggcgcctgtaatcccagctacttgggaggctgaggcaggagaatcgcttgaacccgggaggttgccgtgagccaagatcgcgccattgcactccagcaacaagagccaaactccgtctcagaaaaaagaaaggaggataaacgctcaagggagggcatgcctggtggagggaacggcttgagcagaagctgggatgtggcagatccggagcggggcggggggcatttgcagaactctgaccagccaccgtgtggctggggcaccgagatccaggcctctgtttccctatctagatgcatcgatggggaaagggaggcccccagaccaaaggggcggggcctgggcctcttgcctcctggccctattggctgccaggggtctctccccgagaggtctcatcctttttttgccacaaaattcagtagttctgggctttttaactcccctcctctgtctgaaaccggaaaagtctgtttagcaaacgcggtgggaggaggcagggcgggcccggccggggaaacgcgcgccgctgttgccacctggtggccatggggagaatctggactacccgctaatcgccagggctggggtgggatttcaggagcccccccccacacctcggctcagaccgcagtggggatcagggggaggcggctgcagaacgcgagggaggtggggcagtgtgggcagaaagagggaggattcagggtgtgtaaggggggcaagggtcctgctgcgagttggtgggcgtgaggaggaaggagcgtgggggcaaaccacggttcctgttaccggagtgcccggctgctccactccccctaggccgtcccttcccctgctcagtcctaacttagtagggttccaagctctcatccggctctgtctcccccggattaggtgctcctggaggagacctagaggaagagattaataaatatatgtggaatgaatgaatgaatgaatgaatgaattccaaggctcgtgttttgagattttgagcaggacattcaagcttcaaacaggaaaaaaatacccaagaggaggctcatttacgatgattttgaacagctgtgtaaggtcattatcaccacccccattttataggggggtgagggtggggtggggggtgggatgggaggaccgtcatttttcccacaaagtttacagcccccttccctatatgcctggatcctccaagctacaagaccccgcaatgctgcagggagcccttgagtccagactccccatccagtgctcctgggggtggatgcccagcccagggtccagggatccatctgagccccccttgcccccattcccagtccattctacgccagaacaggtaaatggcagggtctgctcctgccccacggatgccaggcccagcagggtgcagcagcttccatttcatggcagcatctagggttcccccgcaggatgggtggcaacaggcacggggcagagaggaggcaggtgcactggagcctggaggagctctgggttatttgggtccaaatgtgactcctgtgtgtgctacgtagcctcgggcgagtcactcaccctctctgagcctcaacgatcacatctgtaaagtacaacagtcatggttcctttcagggggtggttgtagggatttggtagggaatcatgtgagtggatggaatgggctgggtatgccataagtgcttaataaccagccgttgtgattgagatagtcgctcttcgtgtctgtaagacaaagtggatgttttcgtttctccctcaggcctccaggccctgatatcccaggagcgatggatgtctagcccccccaccccccgggcagggttgcacccctgaccgtctggcccactgggccccaggaccttggccttgcacctgtctccatcctccaaggacaactctgtatccagggccagctcaggggcaccctcaggtagctctgtcttctcgagaggctcagtcctctcgcctttgtcccaggacatctctaccaccagggcctcctgcagggatgcctcttcctggaagtccactgggttgatccactgccaagtctgcagagggagggtagggccacagctgtgagcagagctctacttcccatccacagcaggatggaacggaccaggtcactgctggttaaattctctaacatcctgagacctggacgggtgcagtggctcacacctgtcatcccagcactttgggaggctgaggcgggtggatcacttgaggtcagcagtttgagaccagcctggagaacatggccaaaccccatctctactaaaaatacaaaaattagctgagcttggttgcgcacgcctgtaatcccagctacttgggaggctgaagcaggagaatcgtttgaacccgggaatcagaggttgcagtgagccgagatggcgccactgcactccaggctgggtgacagagcgagactccatatatcctgagaccgatttgaggatggagtctgccgcactgactcccattcagcccctcttaggaagagcactcccatctgtctttgggaaatttccctccctcttttcacagatggtgtggttgacagtgcagtgaccccacctcagctctagcaatggtcatgtgaccctggccagcccacccatcagacccttccctacccctctggttctagccataggctcagggaagggcatgtgacccaagctggaccaatcagtgatggccctgagacttttgccccagttaatggggaaaatggacaccctgcttccaatcagagaaggctcagcctgcctgcggaagaaccctgaacgggcagctccgagatagaccccaatcgctggattcaggcatatctgaagcccattcccttgggattttttccatcaggtttcctttataataaagccactttgaattctgtttctagtgccaggaaatggacctctgcctgcctgtctttaaaatgggaaggggtatggagcactggttttggagtccttaccttgatgaattgggagagaataaaatgagctaatgcgtaacccttgtccagcatgtgcacccaataaaaagacttggaattagaaaaggcatccttacctccttccctccagggaactcaatggcggagctggcacagggtgtgggcagcggcgggcacaggtgccgtgcggccctggggaggaaaggggaccagtgagaggagctgaggttttttttttttttggagacggagtcttgctctgttgcccaggctggagtgcagtggcgcgatctcggctcactgcaacctctgcctcctgggttcaatcgattctcctgactcagcctcctgagtagctgagattacaaacgtgtgccaccacacccggctaatttttgtagttttggtagagagaggtttcgccatgttggccaggctggtgtccaactcctggcctaaagcgatctgcctgcctcagcctcccaaagtgctgggattacaggagtgagccaccgtgcccggcttgaaagcagctttcaatcagacatgcccaccagtgtcaccgcccctttccatgggaatgaccaaggacccaaaagttactatcccttccctagaaatttctgcataggatcacctgaggtcaggagttcaagaccagcctggccaacatggtgaaaccctatctctactgaaaatacaaaataaatagctgggtgtgatggcacgcacctgtagtcccagctacttgggaggctgagacaggagaatggcttgaacccgggagggggaggttgcaataagccaagatcgtgccactgcactctagcctgggtaacagagtaagactccatctcaaaaaagaaaaaaaaaagaaagaaattttgcataaactgccccccttaatctgcatgcaattaaaagtaagtataaatctgactgcaaaaccgctctcagcggctactctccgcctacagggaagccctgctctgcagaggcagtcacggagctataactgctgcttcaataaagctgttttcttctacctctggcttgcccttgaattatttcctgggcaaagccaaggacccaatctgcgggctaagctccactttagggctcccctgcccagcatcattaccatcgctatggtaacggtaagaggtgtcagttacctgttcaggccaaggtagccaaggacgcccacgagaaggatgctcaggaagctccccagggaggcgaagaagatgagccaatcagaaacctgcacttctgaggtgggagagcgtgggttggcagagggctacctcctgcctcttcctcagggaaggagctaggagggcctggtttctccatgaacttgctgctgatcctggtgcacatgccacgggcttctcactgggagaccacagaacccacctgcccggtagctgtcaagaaataaaggcctggcatgcaggaagtgttcaagactctgtaattccaggccgggcacagtgactcatgactgttatcccagcactttgggaggccaacgtgggctgatcacctgaggtcaggagttcgagaccagcctgaccaatatgatgaaacctgtctctactaaaaacacaaaaattagctgggcgtggtggtgtgcgccggtaatcccagctacttgggagggtgagacagaagaatcgcttgaactcgggaggcggaggttgcagtgagccgagatcgcatcattgcattccagcctcggcaataagagggaaaatctgtctcaaaaagataaaaaaagactctgtaattccaggagcctgcacatagggcacatgtggctgcccctggacccaggcctgcctgccccccaccaaccctgactcttttgttctctgggttccagttggttctcttggaactgaaaggacaccgtggcatgaacagggatcatttgatctctgaatctcttataaccatgcacccgacaacagagcctgtgttgttctcttcctcctcctcctcctcctcctccctcttcttctattcctcttcctcttcttcttctttcttctccttcttcttcttctatttttttttttttttttttttttttttttttttttgagacagggtcttgctccgtcgcccaggccagagtgcagtggtgcagtcacggctcactgcaaccttgaactcctggtctcaagccatcctcccacctcagcctcctgagcagctgagactacaggtgtgcaccaccacaccccactattttaaaaatattttttgtagagatgaggtctcaccatgttgcccaggctggtcttgaactcctcggctcaagcaatcctccagcctcagcctcccaaagtgctgggattacaggtgtgagccaccacaccgggttttgcctgtgtcctccttatttttgcattcatttatttgtcgctcaatgaacagattcctgcatcttcctcctccccaagagcccccagataccttgacacatctaccccaaccccgcagtgtcagaccagggagaagggacagttgtaaacaagggcatggccagaaggaggcagagaagtcttgctggaggagggaacttttgagctgagttttgaaggacgaataggagttggaccgtgtggaaaacaaacattccaggcaggaggcagggaagggcctgcatgggcaaggctcctggagtgtgagaggaagctgcgagagaaggcaatgggagcagtttgagctgctactttctcctgagggcagtagggagccatagagggagtgagagtgagggcagggctgctaagatcattgtgggaagcgcagtgcagtgcatgctgggtaaataactgggtcctaccccctccactcaccgatgctgaagcgctggggctggctccagacacccctcagccacgctgtgtctgctcgcacctgcaccgtgtaggctacaccagcccgcaggccactgagggtaacttgggtctctgtgggctgcacgggatgctctgcagtgggagaggcaaccctgagtcctgggacctctttactcctcagaggccaggctgggctaccacagcctgtgggtggggtggggattcataggcattttgctaaaatctctactctttctttctttttttttttttttttttgagacggagtcttgctctgtcgcccaggctggagtgtagtggcgccatctcggctcactgcaagctctgcctcctgggttcacaccattctcctgcctcagcctcccgagtagctgagactacaggcgcccgccaccacgcccagctaattttttgtatttgtagtagagacggggtttcactgtgttagccaggatggtctcgatctcctgacctcgtgatctgcccacctcggcctcccaaagtgctgggattacaggtgtgagccaccaagcccaacctaaaatctcttctcttaatgcgcccattcatctcaagattttttttttttttgagatggagtctcactctgttgcccaggctggagtgcagtggcacaatctcagctcactgcaacctccacctcccaggttcaagcgattcttgtgcctcagcctcctgagtagccgggattacaggcgcccaccaccatagccagctaattttttgtatttttaatacacatgaggtttcaccatgttggccaggctggtcttgaactcctggcctcaagtgatccgcccgcctcagcctcccaaagtgctgggattacaggcgtgagccaccgcgtccggctgacttgttggatctttgggcaggtggatctgaggttggaggcaggattggactctggaggcagggcttggacacaggaccaaactgaggactagctaaagcaggtcctgggctttccataagacacgcccaccagtgtgccatgtcagtttaccattaccatggcaacacccggaaattaccgcccctgtccacggcaatgatcccacaacccggaagttactaccttcatcctagatatttctgcataaaccgccccttcatttgcatataattaaaagcgggtataaatatgagacgtagctgccctgcctgtggggcgtccccactctgcaaggagcaggacttctgctgctgctctacacggccacttcagtaaaagtttctgtctaacaccaccgacatgcacttgaactctttcctggggaaagccaaaaaccctcctggctaaaccctgttttgtgggctttcctgtccctcatcagatcccccctccaggccttagtttcctcatctgtggaatggagacagtcatccctgcttgatgagagttcagctgctgctacatgtgaggggcagcttcccatggatgaatccaatacaccataagcacttggctggtgcccacccagccttctccagggtctgcaaggggtgatcgagaccctcaagttcagctgggtgctcatgactaatcccagcactttgggaggccaaggtgggaggatagtttgaggccagaagtttgaaaccagcctgagcgaggccggacacggtggctcacacctgtaatcccagccctttgggaggccaaggcgggtgattcacctgaggtcaagagtttgagaccagcctggtcaacatggtgaaactccgtctctgctaaaaatacaaaaatttgccaggcatggtggtgggtgcctgtaatcccagctacttgggaggctgaggcaagagaattgcctgaacccgggaggcagaggttgcagtgagctgagatggcgccactgcactccagcctgggtgacagagacagactccctctcaaaaagaaaaaaaagaaaaaatcccagcctgggcaatatagcaaggcctcatttctacaaaaaataaaatattaactgtgcatggtggtgtgcacctgtgtttccagctactagggaggctgaggtgggaggatcgcttgagcccaggaggttgaggctgctgtgagctatgatggcaccactgcactccagcctgggcacagagtgagtccctgtctataaaattaaaaaaaaaaaaaaaaagaccctcaagtctaattctcttgtttttgttttttgtttgtttgttttcgtttttgttttttctgagacagagtctcactctgtcacccaggctggagtgcactggtacaatctcggctcactgcaatctccgcctcctgggttcaagcgattctcctgcctcagcctcccgtgtagctagaattacaggcatgtgccaccatgcccggctaattttgtatttttaggagagacggggtttctccaagtttgtcaggctggtcttgaactcctgacctcaggtgatccgcccgccttggcctcccaaagtgctgggattacaggcgtgagccactgcgcccagccaattctcttgttttaagggtttgataaccaaggcccagagaaggacggcaaggtgcccagggtcacacagcaagagagatcacaggccaggatcctcccttcctccccaagccaggtctgcactgcctcacgtacctgacacctgtttgctgtcttcatctcggcagcggacaacatactcctttaggacgccgggacaggtgctcagcagggatggtgcccagtccacagacacagagtccaagctatgattcttcaccgagacgtggtgcggtgtcccagctgctgaggctgcaaccagtaccattgtcatagtcaacaccaagaatgctggtcgaggcctggcacagtggctcgcacctgtaatcccagcactttgggaggccgaggtgggtaagtcatttgaggccaggagttcaagaccagcctggccaacatggcaaaaccccttctctactaaaaatacaaaaattagccaggcatggtggcggacacctgtaatcccagctactcaggaggctgaggcaggagaatcacttgagcccaggaggcagaggttgcagtgagccaagatggcaccactgcactccagcctgggcaacagagcaagaccctgtctttaaaaaaaaaaaaaagcccagccacgatggctcatgcctgcaatcccagcatattgggaggccaaggtgggtagatcacttaaggtcaggagttcgagactagcctgaggaacatggggaaaccctgtttctactaaaactacaaaaattagccaggcatgatggtgggcgcctgtaatcccagctactcggcaggctgaggcacgagaatcgcttgaacccgggatgcagaggtttcagtgagccaagatcgtgccactgcactccagcctgggccacagagagtgactctgtctcaagaaaaaaaaaaaaaaaaaaaaaaaaggagtgctggttgagcacttcctgaatgcccagcctcccactgtccagagacggaggtaacattggccacagagtcaggtgagctgggttttaattctggttctgccactcagtcactgtcatttcccttccctgggcctcagttttcttatctataaaatggacaatgctggccgggcgcagtggctcacacctgtaatcccggcactttgggaggccaaggcaggtggatcacgaggttaggcatttgagaccagcctggccaacatgctaaaaccctgtctctactaaagatacaaaaaattatccaggcatggtagtgcacacctataatcccagctactcaggaggctgaggaaggagaatggcttgaacccgggaggcagaggttgtatgattgcagtggtgcaatcatagctcactgcagcctcaaactcctgggatcaagtgatcttaccacctcagcctcctgagtagttgggactacaggcacatgccaccatggctggcaaacttttttctttctgtagagacggggtcttgctatgttgcccaggctgttcttgaactcctgggttcaagtgatccacaagcctcagcctcccaaagtgccaaagtgctgggattacaggggtgagccattctgtctgccttaacagcattgtccttttttttttttttttttttttttttgagacagagtcttgctctgtcacccagactggagtacagtggcatgatctcagctcactgcaacctccgcctcctgggttcaagcgattctcctgcctcagcctcccaagtatctggaattacaggcacccgccaccacacccggctaatttttgtatttttagtagagacagggtttcgccacattggccaggctggtttcaaactcctgacctcaggtgatccacccaccttggcctcccaaagtgctgggattacatgcgtgagtcactgtgcccagcctctatttttttaaattatttaaaaagaaaaaataatgtaaacctgcaggtttgggtcacttaccattgcccccaaagtggtaggtggacaggaccgtagaccacaaggtgagcttctcggggtgcgcagaggcaaagatggtaatgtagtaacacttttcctgccccattgccccagactctcgactccagctgtaggttgctggaaggataagcaaaggccaggccattcagtagattgtgttcccacctctgcacctttgcactggctgtgccatctgccaggaacccccagaaaactcctactcatgtttcaaagcccttgcaccaatatcccctcctccaagatctcttccctatgcaacacccccaaccccatccccatccccctctaacccagcccttactccatggaaccagggcttcttttttttttttttttgagatggagtctcgctgtgtcacccaggctggagtgcaatagcgcaatcttgactcactgcaatccctgcctcccgggttcaagcgattctcctgtctcagcctcctgagtagctgggatttacaggtgcacaccatcatgcctggctaatttttatatttttagtagagacagggtttctccatgttggccaggctggtctcgaactcctgacctctgttgatccacctgcctcagcctcccaaagtgctgggattacaggtgttagccaccttgcccggacaatggggtcaggggttccgtgtccagttctgtctcctcaggctgtgtattcttcaaggaacaggctgaggctgaggctttctggggctctggcaaggcccagagcaggaagcgggagagtgagaggccacctgagcctcacggcccccctttccctaaagactgctcattaatttgccaccagcatctcgcgaactgccaccttccctggcgcggttgaatatttaacaaacaccttgggatgtgagattcattacctgtatgtgtgtgatctgcctggaactgagctcaggatgccagcaagaggttccagacccatatgggtgagaggctccgaacctcaccctgtccctacctctgtatgacattgagtaagcagcaacacctctctgggccttagacacccgctgtgtgccttccctgcaggtttgaacccaccaggacctaaaagggagggcacagaggaggggtaggcgcaggccattccaggccattacccattccagccggatccgggtcttgcggcgcagtcaggctgcaggtggcaaggcccccgtcctggcccacaggctgccattcaatgcaatacgtcatgctctgagcccgggctggccaatacatggtggtcccgttggttccgacgctgatattcagagccactggttctggaaggagaggggagagacgcatcgagacagttgccatctctctccccagtccccttctctggctcctgcagcctctctcccaccctctcgtctatacccctgaccctacagggccaggggtgtctgtgtttggctgtttccctgcactggaggctgccttggggccaggcacaaagtgggtagcagatggcgtttgtttttttttgttttttctttggagacggattcttgctctgtcgcccaggctggagtgcagtggcatgatctcggctccctgcaacctcagcctcccgggttcaaatgagtctcctgcctcagcctcctgagtagctgggaccacaggcatgcgccaccatttcctggctaatttattattattttttggtggagatggggtttcaccgtgttgcccaggctggtctcgaactcctgacctccagtgatccacctgccttggcttcccaaagtgctgggattacaggcataatccgccgcatccagtcagcaggtggtgtttgaatgagctgagtcctcctccagcctaactgctgtctccttgccaggatattcaccatgagagcttcctgtactgccattacacccacttccagccttgtaggcgtctccggctgtggcagatacctggctgcccaccacttgcctagcctaggcggagagtgtgatgcaagactaggcctccctggcctgaccggcgccactggtggtctcatgccaaactcagaagcacgagcacacacccactcagtccctgggcaaatctctcccactccctcccgccagggcgtcttcatgaatgtcagagagatggatactgcttgcaattctggggatagcaacagccgtttattgagtaccaactgcatgtgccaagccaatgctgagagctttacaggcaccatttcactatgatatgggaccaggctgggtacggtggctcacgcctgtaatcctagcactttgggaggtggagatgggtggatcacttgagcccaggagttcgagaccagcctgggcaacgtagagagacacctgtctctacaaaaaataaaaataaaaaattaaccaggtgtggtggtgcatgtctgtagtcccagctactccagaggctgaggtggaaggatcacttgagtctgggagttcaaggctgcagtgagccatgattgcactccagtctgccaacagactgagaacctagctcaaaaataataaaaatagtaggtcggccacagtggctcacacctgtaatcccagcactttgagaggctgaggtgggtggatcacctgagggcaggagtttgagaccagcctgggcaacatggtgaaactccatctctactaaaaatacaaaaattaggctgggcatggtggctcacgcctataatcccaacactttgggaggccaaggcaggtggatcacttgaggtcaggagttcgagaccagcctggccaacgtggtgaaaccccgtctctactaaaaatacaaaattagccgggtatggtggcagatgcctgtaatcccagctactcgggaggctgaagcaggagaatctcttgaatctggaaggcggaggttgcagtgagctgagatcatgccatctgtcacaagaaaaaaaagaaattagatcttaaataaacacagggtcaactctagccttttttctttctttctctcttttttcttttttgaaaaagagtgtagctctatcaaccagggtggagcgcagtggctcagctagtttttgttgttgttctttaataatgcataatagccaggtatgatggcacatgcctatattcccagctatttgggaggctgagggagaaagattgcttgagcccagaagttcaagtccagcctgggcaacatagcaaaactctgtctcttaaaaaaaacaaaccaacaacaacaaaaaactgcattatggatcttgattattgaattttttttttttgacacagtcttgctctttgttgcccaggctggagtgcaatggcacaattttggctcactgcaacctctggctcctgggttcaagcgattctcctgcctcagcctcccaagtagctgggactacagccaccacactcagctaatttttgtatttttagtagagactgggtttcaccacgttggccagactggtctcgaactgctgacctcaggtgattcacctgtcttagcctcccaaagtgctgggattacaggtgtgagccaccgtgcctggctgattactgaatttttgatacacccctaaatcaggcactcctttaaaattttctgcctcgctcctctcaccctggtctagctgaggctcagagtaggtgctcagctctgaggggccctcataccgccctccccacccagaggaggcacctgtgtgggtgtcggcaggaatgtgccacgtctggttcaggccaggaccaaattggttcgaggagatgacagccacgttgtaggcagcacccgagagatagggcatcttccccaggtgcagggtcctggtggccttggccttacacgggcaggacagcatgtggagctgtagtcggtaagtgacctccgtgccaggcgccagcccttgacagccttctggaagctccagctgggttggctgtcaggagtatgaaagacagcttgtgggtacctgatcacactcatcatcccataggcagacagcagggcacagcctatgaagacagacttggacaaaggccacagccaataacatgcatcaaaaattaaaagaataataaacctcaatgctggcaaagctgctgtgagacaggcattcacctcccgcacacatctagcttgagggaggtgggaaattgacaaaacccactgacattcaggaaaacaaaaatgtttccatcttttaacccagttacctcaagcagaaaatttttccttagaaaaggaatttgagaggccgggcacgggggctcacgcctctaatcccagcactttgggaggccgagacgggtagatcatgaggtcaggagattgagaccatcctggctaacacggtgaaaccccgtctctactaaaaatacaaaaaattagcccggcatggtggtgggcgcctgtagtcccagctactcgggaggctgaggcaggagaatggcgtgaacccgggaggcggagcttgtagtgagccgagatggcgccactgcactccagcctgggcgacagagcaagactccatctcaaaaaaaaaaaaaaaaaaaggaaaaaaaagaagaggaatttgagttagaggaacataggaaataaaggatttttgctacagccttatagtaacagcccattagggacctgactaagatgactatggtaaagtcaacgagtggagtatttgtcagttttgtctcaacagagatactccctctatgcctcagtttccctctctgtaaactaatcagactgcacttaatgggttgttttgggacttaaagcaataatctgctacccaggcaaatgcagtcaccattatctccttcctggccttctggcttctgtgcaattcccccacactctgtttctcacacaggagccagggaaagtctgtgaacatctgagtccagtcatgtgcctctcctgctcacacacacactccatggctccctattaccttcagagttaaacccacaatttgcccacttcctgccacctctacatctcatctccctccatctaccacttgctcatcccccgcctaggcttttgcctcctgctccccatcccaggccaccccacagccctgtgacagccccgttacctgctctttcagggtcagccgcctcctcccatcctggcccagctgctccaccgagaatctcacctgaggctgtggggggttttctgcaatcagaaccaaaccaactagacgaattggaaggagagaaagactgatggatgttttctttgtaaatgatggattctccacatttacaaagtgaaaatcccttgctgccccaaattgcagaaaagagaaaaaactgaaggaagaaaaattaacacaatttgcatccccagggataactgccacctgtaatctcatgttgcctaaggttttttgtttgtttgtttgttcgtttgctttttgagacgaagtctcactctattacctaggctggagtgcactggtgcgatctcggctcactgcaatctctgccttctgggttcaagcgattctcctgcctcagccttccaagtagctgggattacaggcatgcaccaccatgtccggctaatttttgtatttttagtagagacggggtttcaccatgttggtcaggctgttcttgaactcctgaccttgtgatccacttgcctcggcctcccaaactgctggaattataggcgtgagccactgcgcctggcctctaagttcctttttgaatgcaaatgtatttctctgcatggttttgttgttgttgctgttgttttatagactagagacagagtctcgttttgattcccaggcttgtctcaaactcctggcctcaaacaatcctctggcctcggcctcccaaagtgctgggattacaggcataaaccacagcgccaggcctttctgcatggtttgaaaccctctcactcattttcctgttgcccaggctcagggcagcagctgtttagtacaccctgccacctgcaggtgacattgtccttgagacaccgtgaggttcagcctgatgattctcacttgataaagccctgtagtgggctgagcgcagtggctcatacctggaattctagcactttgggagaccgtggtgggaggatcacttgaggccaggagttcgagaccagccgggcaaacatggcgaaaccccatctctactaaaaatacaaaattagctgggcgtggtggtgcatgcctgtaaatcccagctactctggaggctgaggcaggagaatcgcttgaacccgtgaggcggaggttgcagtgagccaagatcacaccactgcactccagccagggtgacagagcaagacagtctcaaaacaaaacaaaaaatagcagtaggccgggcgcggtggctcacgcctgtaatcccagcactttgggaggccgaggagggcagatcacgaggtcaggagattgagaccatcctggctaacatggtgaaaccccgtctctactaaaaaatacaaaaaattaaccgggcgtggttgcagacacctgtagtcccagctacttgggaggctgaggcaggacaatggcgtgaacccgggaggcggagcttgcagtgagccgagatggcgccactgcactccagcctgggtgacagagtgagactccgtctcaaaaaaaaaaacaacaaaaaacaacaaacaaacaaacaaaaaaaacagcagcaaaaaaccctaaagtgggtgcagcaagaccggatgccacattgtcagggtttgagcacccatttctccctctgccttatttctaacactcaccaccttgtttctaatacctgctgccttatttctttttccattttattttattattacttttttttttttttttacttttttttgagacagagtctggccctgtcacccaggctggagtgcagtggtgtgatcttggatccctgcaacctccacctcccgggttcaagggattctcctgcctcagcctcccaagtagctgggattacaggctcccgccaccacgcccagctaattttcgtatttttagtagagaaggggtttcaccatgttggccaggctggtctcgaactcctgacctcaagtgatctgcccgcctcagcctcccaaagtgctgggattacaggcatcagccaccacgcccagccccattttattttattttttagagatggggtctcactatgttgcccgggctggtctcaaaccactggcctcaagtgatcctcccgcctcagccttctgagcagctggaactacaggtgtgcaccaccacctccggctgttgccttatttctaatgcttgcccctgttcctgtactcagagtgatcttaccagggggaacgcacacggggctgctccacttgctccaggaacttccttggctccccagctgccgtcgtcggagctggaattcctgggccacattcatctccagggggcagaggcaggactctggggagaggcaggtcgaacatcaggccgtaagaattgtccaggacttggcaccagtcacttaaccatcatgtgcttattgagctccaactgtgtacagagccacgtgctgggtcctgggggctcagcagaagcaggccaggccctgtcctcttagggcctccaggatcacccacgtccatccctgcccctcagttcaagtcctggctgcggccatcccttcggtcgtgaccttggccaaaggcttctcaccccctccaagtcgtgatttgtttccccacctgcaatttggaaagaatccaatactgaactatggggcagggtaagaggcatacaaaaaaattcagcattggacctggcatacagtaggtgctcaattaatgccaatttgctgcagctgttgttgtcattactattattattctcaccagtatcatcatcctgaggtccgcagtcgccctagaataaaaacatattcatatattgttttgcattttggtgctgaaaaatatttgctgttttacaattagttatttatttacttatttatctgagacacggtctcactctgtcatctaggctggagtgcagtggtgcaatcatggcttattgaagcctcaacctcccagggctcaggtgatcctcccgcctcagtctcctgagtagttgggactacaggcatgcaccatcacactcagctaatttttgcatttttggtagagacgggatttcaccatgttgcccaggctggtctcaaactcctggcctcaagcaatcccaccccaactcggcctcccaaagcactgggattacaggcgtgagccaccgcacctcgctaaatttttttaaattaaagaccatacttccagggattatttctatcgttaattactagagaaccttctctaggttcaaaccttctttaggaacatataaagcagtaaaaaattattataactaaattttaaaaattaataattattttactaaacacaatgtgggatcctggattgaatctgggagcagaaaaaagacattcctggaaaaattggtgacattcaaataatgcctggagtttatgtaagacattaacattagaggagtttgggtaaaggatatatgggcgttctctgcaccagtttatatagtaacttttctgaaaatcgaaggttattccaaaagaaaaaatttattttaaaaaattttagtgggagcaaggcgtggtggttcatgcctgtattcccagcactttggaaggccaaggtgggcggatcacctgaggagtttgagaccagcctggcccacatggcgaaaccccgtctctactaaaaatacaaaaattagctgcgtgtggtagtgggcgcatgcctgtaatcccagctactcgggaggctgacgcaggacaatcgcttgaacccgggaggcagaggttgcagtgagctgagatcatgccactgcactccagcctgggcgacagagcaaggctccgtctcagaaaaaaaaaaagaaaaagaaaaaaaccacctcaggggctagagtgggggctggttgggagcggggacagatgcagagatggtgagactgatttgggggtgaaggtgccctggagaggcccgtgtccaccctggacttgggaaacaaactcaccaacttccatgggctgctgggtgtccggtgccggaactgcacctcagcaccaacctggttatccggggtctcccactccatacgcagctgcccggccaacttggacaccttgatgtctcccagaggaggctcatatttaactggaagcagaggtagggattggcgaggggcagcccacacgtatgtgagttaatgggccctgaaaatccaccctgtccagggtaagcaactgaatccctaaatatgaattaggggacacttgcaggtcccagctaagcctggtatattatgatcaaaaagtcaagatttatacacaagccacatacggtggctcaccctgtaattccagtattttgggaggccaaggcaggaagatcacttaagcccaggagttcgagaccagcctgggcaacatagtgagaccccctcatctctacataaaaattagccaggcatggtagttcatgactgtggttccagctacttaggagagtgagatgggaggatctcttgagcctaggaggctgaggctgaagtgagccctgatcacaccactgctctccaatctaggagagagagggagaacttgtctctaaaaaaacaacaaatatggccaggagcagtggctcatagctgtaatcctagcactttgggaagccaaggtgggtggatcatctgaggtcaggagtttaagaccaacctggccaacacggtgaaacaccgtctctactaaatacaaaaattagccaggcatggtggtgggcacctgtaatcccagctacttgggagcctgaggcaggagaatcgcttgaacccaggaggcggaggttgtagttagacaagatcccaccactgccctccggcctgggtgacagagcaagactctgtctcaaaacaaattaaaattaaattaaaatttaaaaataaataatttttaataaagatttatacacaggatcctgttagtgaagataactttaaaatattaacacccattgctggcaaggctgtgaagagacgggcacttttgtaaattgcttgccagagggtaatcaattctggtaagcaatttacaaaagtgcctgtctcttgggggtgatccgcccacctcgggctcccaaagtgctgggattataggcatgagccactgtgtccagccaattctttttttgtttgtttgtttgtttagaactatcagggaaatcgtacttagtttttagatctatttcaaggaacctgacccaaggagagacataaattagcataaaatagtcttgctgcaccgtggtcatacccggcctgattctttttttatatcattgtataaatttaagaggtatgatggtttgatatacatatccatagtgaaatgattactacagtaaggaatttaacatatccatggccaggcacaggggcccacgcctgtactcgaagcactttgggaggccaagacaggaggatcatttgagcccaggagttcaagaccaccctggccaacacagcaagaccccatctcttaaaaatatatatacatatccatcaccttctataattacttttttggtgtgtggtgagaacacttaaaatttttttttttttttttgagatggagtctcgctctgtcacccaggctggagtgcagtggtgtgatctcggttcactgtaacctccataccacaggttcacgtgattctcctgcctcagcatcccgagtagctggaattacaggcgcccgccaccacactcggctaatttttgtatttttagtagagatggggtttcaccatgttggtcaggctggtctcgaactcctgacctcaggtgatcctcccacctcggcctctcgaagtgctaggattacaggcgtgaaccactgcacccagcccttaaatctattcttttagcaaattttcaatatacattatttttaattatagttctctactgtaccttggaactctagatttatttgtgctgcgtaactacaaattgtattcctttgacctacatctcccccatttcctccttctctccatccccggtaaccacagttctactttcggtgcctagatattcgactttttttttttaagattatacatgtaagtgggatgggcgcggtggctcacgcctgtaatcccagcactttgggaggctgaggcgggtggatcatgaggtcaggagatcgagaccacggtgaaaccccgtctctactaaaaatacaaaaacttagccgggcgcggtggcgggcgcctgtagtcccagctactggggaggctgaggcaggagaatggtgtgaacccaggaggcagagcttgcagtgagccgagatcgcgccactgcactccagcctgggcgacagagcgaaactccatctcaaaaaaaagaaaaaagaaaaaaagattatacatgtaagtgagatcatgaaatgtttttgtttctgtgcctggcttacttcactcagcgtaatgtcctccagctttgtccatgttgtggcaaatgacatgttttccttcattcttttcttttcttttttcttttttttctttttttttgagacagtgtcttgctctgtcactcaggctggaatgcagtgacttgatcttagctcactgcaacatctgcctcctggattcaagccattctcccgcctcagcctcctgggtagctgggattgcaggcatgcaccaccacaccaggcaaatttttttggcttttttgtgtgttgctgttgttttttagatggagtcctgctctgtcgccaggcaggagtgcagtggctcaatctcagctcactgtaacctccacctcccgggttcaagcgattctcctgcctcagtctccccagtagctgggactacaggcgcgcgtggccactcctggctaatttttgtatttttaatagagatggggtttcaccatgttgaccaggatggtctcgatctcttgaccttgtgatccacccacctcagcctcccaaagtgctgggattacaggcgtgatccaccgcacccggcaaaatacatgatgtcgagtcatgagaacagataataagaacccaaccaggtcttggcagcattatggctagcagagagaaaccagaagcaatctaagtgcccacgaataggggattggtaaggggaccatgaaagactgctttgtcacaatagtgtttgcgtgacactacgtgaagtgacaatggctagtagtatcaagtcccttgccaagggccaggaatcctctctagctccagccttgcagcctgatggcctctctgggtaaaaaacggacggggggagaacaaggtgctaacctgagttgtagagctgcagggtcacctcaggagacttctctgtctggttcctggcccaggattccacccagagtgtgacagtgtacagcacagacaccccagcctggtcggagaactgcagcctggtggctgagccggcggcgaagtagcagcagcgcccggagctaaggctgcagcaggaaggagggtgtcagtgccgagtctggggtcctagtggaccccacagccgactttgtgcatcacatcccagcatcgtttttttggtgtttgtttgtttgtttggagatggagtttcattctgtcacccaggctggagtgcagtcgcgcaatctcggctcactgcaacctccacctccctggttcaagcaattctcccacctcagcctccctagtagctgggattacaggcacatgccaccacatgcgtctaagttttgtatttttagtagagatggagtttcaccatgttggccaggctggtctccaacttctggcctcaagtgatccgcccacctcagcctcccaaagtgctgggattacaagcgtgagccaccgtgcccagcccccagcatccttttctgtcccttgtacacctcctcccccagcctgggggttccttggagatcagtctgggactggaggggtttgagggaccccagtatctcccagcaaggactgcaccacacagcgaagaaacgaatgaaagggctgggcgcagtgcctcacgcttgtaatcccagcactttgggaggccaagggggggtggatcacctgaggccaggagttcaagaccagcctggccaacatggtgagactctgtctctactaaaaatacaaaaattagcaggtgtggtggcgtgtgcctatagtcccagctactcaggaggctgaggcaggaaaatcactctaactcaggaggcagaggttgcagtgagctgacatcatgccactgcactccagcctgggcaacagagcaagactccatctcaaaaaaagaaaaaaagaaaaaagaaaaaatggatggatggatggatggatggatggatggatggatggttggatgggtggataagtgaaagggtgaagaagaaaaaaggactagagagaccctcatggccacccaccctgggatgcctaccttcactgaccaaccccccaccacaatcctccaactctctcttcttagatgagaaactgaagcccaggaaggagtgttgacccagccaagatcacgcatccgagagtaggggcaccagagggggttgaagcaagagtgggatggtgggtgagggtttgggaatggtagaggggtcctcaccaacaccgcaggaagtggctgaccccagctgtgggaccctcatactgccaggagcactcgtaacgatcactggatatccgatagcatctcaggtccctagggcccgaggccgagcctggaagagatcctgtaggcttgggaacagaccagagtctggaggggtcttcgtgcctaagacaaatctttgtgatgcttacatctttcagcgtcacctcagcctaaaccctccccgcgtccttcctacctcatcccctgccgtctctcacctcaacctattccgaatcctcagcctcctaacttgtcctcacagaggccagatgtcctgccacctctctctctatccctcaccctcctctggtgtttttttttggggggtccccagggccccaactttcctcctctggttcttcaaaacacatcatcacatttgtgatagacatttgtttgcctgttgtctatctcttccactaggctgtggtcttgggaagttagttgagctcatagccagttgcctatgtctagaactgtgtccgcacatagaagatgctcagtaaatcgttatcaaacaaaagaatggacagcgtgtctgcttagtgttcagacccttttcagggtgcattaggagcataaatgttccgacaatatggccgggcacggtggctcattcctggaatcccagcactttgggaggctgaggcaggtggctcaccatcacctgagctcaggagttcaagaccagcctgggcgacatggtgaaacctggtctctactaaaaatacaaaaattagccgggtgtggtggcgggcacctgtaatcccagctacttggaaggctgaggctggagaatagcttgaacctggaaggtggaggtggcagtgagctgtgatcaggccactgcactccaacctgggcagcagaacaagactccgtctcaaaaataaataaatgaaataaatgttctaataatttatcaggttggggggggggcttcaaaatgcttaacaggtactttctcccatgtaccgaccaatctgaacggacacagacaccagccctgagaccatgctagggaagtgataatgttcagagaggcggctggctactccagggcaacttgaacctggtaagaatgggccagcaggtggtggggtggggactcccaagaccacaggcagggctgggtctttggcctggtggtggaggccatgggaggggccgctgtggatggggtcaggcagagccctacataatcctcagccaacaatgaggaactgccccgaacctgagtctgcatccggatatggcgggtcctgaaaacagcactcactggttctgcaggcagctgcaaaggcaatgaagacataatgacattcctggccttgcactgtgtggggagaagggctcagccttggggtctacacccaagtgatcatcagccctcccacccacccactttcccatctatgcaccctcctaccaccacccatccatccatctgcccatgtatttatctgcccatctacccatccatccatgtatttattcatccgtccaccatctacccatccatccacccatgaattcatccattcacccatccatccatccatccatccatccatccatccatgtattcatccatcatccatccaccccaccatccacccatctacccatccatccatccatgtactcatccatccatccactcatctacccatccatctatccaaccatccatgtattcattcatccatccacccatctatccatccatccatccacctcaccatccacccattcacccatccatccatgtattcatccatccatgtattcatccatccatgcacccatctacccatccatccatccatccatccatccatccatccaccccaccatccacccatttacccatccatccatgtatttatccatccatgtattcatccatccatccacgcatctacccatccatctatccatccatgtgttcattcatccatctactcatccatccatctgccccaccatccatccatccacgtattcatacatccatccatccaccccaccatccgtccatccatccacgtattcatccatccatccatccaccccccatccatctatccatccatccatccatccatccatccatccatcaatccatgtattaatccatgcatccaccccaccatccacccatttatccgtccattcgtccattcatccatccatccatgtattaatccatccatccatccatccatccatcccaccatccacccattcacccatccatccatgtattcattagtccatccatccatccatccatccatgtatttatccatgcatccatgcattcattaatccattatccattcacccaaccatccatctatccatctagtcaccaatctatccatctatccatccacgtattcattcatccatacacccacccatccatccatttatctacctaccgatatatccatccagccatccatccatccatccatccatccatccatccatccatacatacatacatgtatttattaattcatccatccattcatttacccacccatccacctgtctatccattcatccaccaccctttagtcctcagaggttgagatgcatatttgggagacactctcgggaggtacccctgcaggaaagaacagtaagaccaacagtctggagggcagagagaagtggaggtgtgcctggggtggcaccagtgtctgaagccagcatggggaaagacagtagagggtgcatggcagggagaggcctgccagggctggcccaggcaagcacacttggcccactagcagtcagggcaattattaataacatttctccaggaggcagcgacctccctcagccactgggatccccgtgccctttgggattgccacagtctgctaggtgtggaactgggtgagagaaggagggggatgccaccatggatgggtcaggaagaccccggcgccctcactcccacaagaaggacctgtcctgagccctgcaggcagattggaagccttgggggagaaggcggcaccccaggaaacagccccaagtgtccaaccttgaggggggaaagatgcttaacacacaaggctctccatccttccatctctctctgtgatgacacagaacccccacccacccacccacccctgagagcctaaagcccatcctccttccctttccctggactgaccactcactgccactatctccaggatacctcgtgggctgcctctcgccccctccctgctgctggtctccagccatgcctggcccctgaaggcgctgggaccttgaggtgtggccagcactgctgtgggcattctacaggcactcagtgcatctcaagagccattgaaaaagtcagcaccccgctgatccccagtgtacagagaaggaaagtttatttattattattattattgagatagagtcttgctctgccacacaggctggaatgcagtgctgcaatctcggctcactgcaacctctgcctcctgggttcaagcgatcctcccacctcagctcctaagtagctgggagtacaggtgcccatcatcaagcctggctaatttttgcatttttagtagagatggggtttcaccatgttagccaggctggtctcgaactcctgacctcaagtgatccacccatcttggcctcccatagtgctggattttcaggagtgagtcaccgtgcagggcctgagattattaaaagtatatgggaaggctgggcatggtggctcatgcctgtaatctgagcactttgggaggccaaggtgagtggatcatttgagcccaggagttcgagaccagcctgggcaacacagcgagacgctgtctctgtaaaaagtatacaccaaaaaaattaaccaggcatggtagtgtgcacctgcagtcccagctactcaaggggctaaggcaggaggatcacttgagcccaggtggtcaaggctgcaatgagttatgattaggccactgcactccagcctgggacacagagtgagaccctacctcagtaaataaataaataaataaataaataaataaataaataaataaataagtaaagtatacggaaggatgtgcataggttatatgcaaatactttaccattttatatcaggaacttgagcatctttggattttggtatctgcagagggtcctggaaccattgccccgtaaatatggaaatgactgtatacattatattatgtatgtctatctattgtaaactacatacataagatactatactatgtatacctattagatacatacttgctttttattccttccttagttttttttctcattgaactccgggaggtggaaaaaatttagtgcatttcacagaagagaaaatctagaccagaggaaagatgtctaagttcgatcccagaagccatgactgcccatctcccatttgacagcaggaaagactgaggcacagagagatgaaaccaacccacacagcaggcccacagctctccacacatacacgtgcctccacccagcaagaggagccgccatgccagggtcaggggactcaccgccctgcctggacagcaggaagaggaagaggagggggaccacccaggtcaccagcggctccatcggatccacgtagagccccacagccccaggggagcctctctgccacctgcgaggttcagccaccccgtccccactccggaacacattgaagctgagcaaggagaaaagactgaaaaaaaagaaaaaagaaaaaaagtaaagtgtcacagcccatccctaaggcaagtcaaagtgaaagagaaacccaggaagtcagctccgtggtggtggtgatggtggcggccacagactctggagcaagtctgactttggagcaagtcagggttctagggggttctgccctgctggccccagacctgaactgaacacccagatgccagccccatgggcccatgggccacctgtggttccatgcacttggccaggtctctggccctctctagccaatttttttttttttttttgagatggagccctgctctgtcgcccgggctggagtgtggtggcatgatctccactcactgcaacttctgcctcccgggttcaagcaattctcctgcctcagcctcccgagtagctggaattacaggcaactgccacaacatcgagctaatttttgtatttttagtagagacagggtttcaccatgctggccaggctggtctcgaactcctaaccctaagtgatccacccacctcagcctcccaaagtgctgggatgacaggcgtgagctaccgtgcctggctgccaaattctttttttcttcttttgagatagggtcttgatctgtggcccagctgtagtgcagtggtgcaatcacggctcactgcaacatcaacctccccaggctcaggccatcctcctacctcagcctccccaggaactgggactacaggcatgcaccaccacgcccagctaatttttgcatttttttttttttaagagagggggttttgccatgttgcccaggctggtctcaaactcccgggttcaaatgatccgtccgccttggcctaccaaaattctgggatcacaggcgtgagccaccgcaccgggccatctcgccagcttctgaatctgagactcaagagctgaaggagggcagtgttcttggatggcctaatttcatccttccaacaaattgttacaaagagcttgcagcatgctggccctccacaatgcccacctccccacatgccaagctccagccttgtgcacctgggctcacccctctaatcccagcactttgagaggtcgaggtgggaggatcacttgaccccaggagtttgggtctacctaaacaacatagcaagaccccatctctataaaaaataaagaattaggccaggcgcggtggctcacgcctgtaatcccagtactttgggaggccaaggcaggtggatcacgaggtcaggagtttgagaccagcctgaccaaaatggtgaaaccctgtctctactgaaaatacaaaaattaaccgggtgtggtggcaggcacctgtaatcccagctactgaggaggctgaggcaggagaatcgcttgaacccaggaggtggaggttgcagtgagccgagatcgcgccactgcactccagcctgggcaacagagtgacactccatctcaaaatatatatatatatataaattaaaagttagccagtcgtggtggcacacatctgtattctcagctactcaggaggctgaggtgggagaatggcttgaacccaggaggttgaggctgcagtgaatcgtgattgtgccactgcactccagtctgggtaacagagcaagatcctgtctcttaaaaaaaaaaaaaaaaaaatttaagagatgcaacttagtctttcccccatgttccatttcttagcctctgagtattttgtttcctgcccctccctccccactgtcggcaaagcctctaaatgtcagtggagaagctctgatccaagctaccatgtggatgaaccctcaaaaacataatgctgggctgggtgcagtggttcacatctgtaattccaacactttgggaggccgaggtgggcggatcacctgaggtcaggagtttgagaccagcctggccaacaaggcgaaaccctgtctctactaaaaatacaaaaatttgccaggcctggtgacatgtgcctgtaattccagctattcgggaggctgaggcagagagaattacttgaacctgggaggtagaggttgcagtgagctgagatcgtgccactgcactccagcctgggtgacagagtgagactccatctcaaaaaaaaaaaaacacacatacacaaaaaaaaaaacccatcatgctgggtggacgaagatggacaggaaaggcacacactgtatgattccacttatataaaatatccaaaataggcaaatgtacagaggcagacagtagctgagtggttgtcaggggctggggggaggcgggagtgagaagtgactgctgatgtatgcggggtttccttttggggtgatgcaaatgttctggaaccagatagaggtggtggttgcacaacactgaatgtgctaaatgtcactgaatcgtttgctttaaaatgatgaatttccggcccgggcgcggtggctcactcctgcaatcccagcacttgggaggccgagccaggtggatcatttgaggtcaggagttcgagaccagcctggacaacacagtgaaacccagtctctactaaaaatacaaaaattagctgggcgtgatggcatgcacctgtaatcccagctactcaggaggctgaggcaggagaatcgcttgaacccgggaggcagaggttgcagtgagccgagatcacaccactgcactcccacctgggtgagagagtgagactatgtctcaaaaaaaaaaaaaaagatgaattttaggttacgtgagatgcatctacagaaaaaagaaatattcttagagtccaggggcactgaggagggagaaggagagggtctctcctggggatgagcatctgtggaaactgaggcccaagtggccagggttgtgcaatgcggttcagcttcctgggaggaggtccctccttcaagaagcctggctccgaggggcagctgagctggccagggtcaggcgcccagcaggctatgaggtcagtgagttagggacaaagactcagtgtcctgggcctggcacagtggggacgggggccctgtgaccccatacaggacagccttctctggccccggggcccaggccagggtcagctgggggatggatgtgtgaggcctgggggaggggcagagacagagaaagggacagagatagagagatacataaagatggaggaggccaggcagggtggattatgcctgtaatccagcactttgtgaggccaaggcaggaggattgctgtaggctaggagttcaagagcagcctgggcaacatggtgagactccatctctacaaaaaataatttgctgggcatggtggcaggtgcctgtagtcccagctacctgggaggctgaggcttaagccagggaggtcgagactgcagtgagctctaattgcgccactgcactccagcctgggccacagagcaagaccctgctcaaaaaataacaagaaaggtggaggaaataggtagagatcagaggaaagtcatggccccctcctgaccatcctgagaccctcccaactccaccaattcctggagagtccctcacttgccttatttcacagattgggaaactgagtccaggggcactcagaccacctgaggccccagctggagatgaagagatggattcaaaccaccccttgtggagtatagttttgccccttccagagtggagaccgtgcctcagggcttcccccacccgcaccaaggttggccctctcaggcctcatctttcccacctgcaaaatgggcttttgtgagtatgaaggagggcttggcttgcagtgagcgctgtccacccgctggccagtgtgattagtcattgttgttgttccccagtggcctctgcctggcagctgctggaaaaacatcgagggagggagatacagggctggggaggtgaaaagctggacacagacgcccctagccccttgggatcaggaacagatggaggccgggtgccctgaagtggagcagggaggactgcctggaggagggacacttgagctagaatgtatagaattacagggcatctccggcagaggccacagcagaggcaaaagtccagaggaggtgctttggggaccaccaagatggacacagtgggtctgggtttctgtggggtgatgggctggggcctcgagcgccaggctaaagggcctggctttctccgagggcggtagggagccatggcaggtgtgtgagctggaggggtaccccagacaaaggtgaagtggtatttctccccttattgaagtcacaacctgacactccctctgaagttccccacatcccaccttccccttgccacatcttggcaagcccacctccttccctccgtctctaggcctgccaagaggccctgtgggccccttatggccccacccagctgccccagaagctcgtctgagataagttcccagggctgccccactttcaggtgccccacagactcgggggcgggtgaagcaggaaggatcgagtcacgagggccccagaaaacatgacgggaggaaccacagcacttccccacctcctcagcttccgccttctcagggagagagaccttcagcccgaggaggagggccgagcttccctccatgtggcaagagaccctaacgtcgctgaggatcatctaaagagggtgttgaaggatgcataggagttagccaggagacaacccatttgttaatttaacaaactcataggcatcactcatcaacaagaacaattttcatcattcaatcaggactttctaatgcctctgagggatcatttgaggatgtttaattattatttttatttgagacagggtctcactctgttacccaggctggagtgcagtgacacaatcatagctcactgcagcctcaacctcccagtttcaagctatccttctacctcagcctctgatatagctgagacacaggccaatgccaccatgatgcctggcttttcttttttttttttttttttttacttttgagacagagtcttgctcagtcacccaggctggagtgcagtggtgcgatttcagctcactataacctccgcctcctgagtttaagcaattctcctgcctcagcctcctgagtagctgggattacagacatgcaccaccacacccagctaatttttgtatttgtagtagagatggggtttcaccatgttgtccaggctggtctcaaatgcctgaccttaagtgatctgctggcctcggcctcccaaagggctgggattaccggcgtaagccaccgcccctcgaccatccagctttttttttttttttttcagtttttggtagaaatgtggtctcatgcctgtatcccagcactttgggaaggccgaggtgggcagatcacttgaggtcaggaattcgagactagcctgaccaacatggagaaaccccgtctctactaaaaatacaaaattagccgggcatggtggctcctgtctgtaatcccagctacttgggaggctgaggcaagagaatcacttgaacctggtaagcggggtttgcggtgagccaagatcgtgccattgcactccagcctgggcaacaagagtgaaattctgtctcaaaaaaataaaataaaataaaaatacaaaattagccaggcatggtggcacgcgcctgtaatcctagctactcaggaggctgaggcaggagaatcgcttgaacctggtaggcggaggttgcagtgagctgagattgtgccactgcaccccagcctaggagacaagagcaaaactctgtctgaaaaaaaaaaaaaaaaagaaatgtggtctcactatgttgcctaggctggtctcaaactcctggtctcaagggatcctcccacctcagcctcccaaagtgctgggattacaggcatgagccaccgctcccaaacagattagaggatgttttaaggaagactcaggaggttaccaagaaaaaagttcattcaaccaccacacttcctgatgtcccttatagagacatgtgaggagagttttgatgggtacatagaagctcacaagaataaaatgtatttgttcattcaatacaaggtcctctgatacttctcaaagagaatttgaagtggattttgaagaatatatagatgttaggccgggcacagtggctcatgcctgtaatcctagcactttgggaggctgaggtgggtggatcgcctgaggtcaggagtttgagaccagcctggcaaacatggtgaaaccctgtctccactaaaaatacaaagattagccgggtgtggtggcaggtgcctgtaattccagctactcgggaggctgagcgcaggagaattgcttgaatccaggaggcggaggttgcagtgagccgagattgctccactgcacttcagcctggccaacagagctggacttttgtctcaaaaacaaaaaacaaaaaaacacaaatatatatatatatatacttgtgtgtgtgcgtgtgtgtgtgtgtgtgtgtgttaaccacagaaaaactgcattcattcattcagtcagtccagtcagtcactcaataagcactccttcttgcccactgaggggttgttcaggaggcagttcagtgtaggaattctccagatggagcagcggatttgagacctctctggtggctctctccagcatgttcccacatgcccaacccaaccctggttcagggaacctctctttccccaggattccagtcaaagccccagggagggctctgataggctgagcttgggtcacatgtacaccttgaaccaatcacagtggctgaggtggataaacgagtctgagtcacatgtccaccccaggctggactaagggagaactttgaggcagagctgcccagagtcagaacaattggccattgcaggacatgagcttctcatcacttggggtgtgcaagctacagcctgaagttcacttagtgtaggactgccagataaaacacacgacttccccacccccattgacttctgccttctcagggaccttcagcccgaagagtggggagcttccctccatgtggccaagagaccctgatgcccctgaggggtcatctaaagagggtgttgaaggatgcataggagtttgccaggagaaaatctattcattcatttaacaaactcactcgtagtcattattcattaaataacatttaaattaaattcccagttaaattggaatttcagacaaccaacatattggtttgtgttttgttttgtcttgttttgttttgtttgagatggagtctcgctctgtcacccaggctggagtgcactggcactatctcagctcactgcaacctctgcctcccaggttcaagtgattctcctgcctcagccccccgagtagcggggattacaggcgtgccccattacgcccccttaatttttgtagttttagtagagacgcggtttcaccatgttgcccaggctggtctcaaactcctgacctcagatgatccacccacctcagcctcccaaagtgctgggattacagacatgagccagcacacacggccaacacattgttgtttaatgcaactatgtcccaagtactgaagggggcatacttacactgaaaaaacattcattgtttatggaaatttaaatttaactgggtgtttgctttggaaaacagcctggttgtcttttacaaatttaaaatatagagttgctgggcgcagtggctcatgcctgtaatcccagcacgttgggaagccaaggcaggaggatcgcttgagcccaagattttgagatcagcctgggtaacatggcgaaaccttgtctctacaaaaaatacaaaaaattagctgggcatggcggcatgtgcctgtagtctcagctactccgccctccagcctgggcgaaagagcaagaccctgtcccaaaacaaaacaaaacaacccaaaacatagagttacaccatatgaccccggaagtccattcctaggtaagtacccaagagaaccaaaatatatccacaaaggcagggggcggtagctcacacctgcaatcccagcctttcgggaggccaaggtggatggatcacttaaaggtcaggagtttgagaccagcctggccaacatggtgaaacccccgtctctactaaaaatgcaaaaattagctgggagtggtggcgggtgtctgtaatcccagctactcaggaggctgaggcaggagaatcaattgaacctgggaggcagaggttgcagtgagccaagatcccgcgactgcactccagcctgggcatcagagcaacacttcatctcaaaataaataaataaagaaataaatctatgcaaaaagttgtatgccaatgtttatagcagctctattcagaatagctaccaaaatgtgaaaaaatccaagtgaccaccaacaaatgagtggatcaacaaaatgtacatgtacatatatacaatggaatattatttggtcatgaaacggaatgaagtactgatatttgccacaacatgggtgcatcttgaaagcatgatgctgaacgaagccagacacataaggccacatgttatgttttcatttttatgaaatatccagcacaggaaaattcatagaacaggaagcagattggtagttgccaggggctgagagagggggaatgaggactggctgctaataggtacagggtttcttttggggatgatacaaatgtcctggaatcagatcgtggtgatggttacacaactctgtgagtatgcttaaaacactgaatttattgcacactttaaaagcgtgaattttatggtatgtgaattatatgtcaatttttaaaattgtatgagaaaaacaagttttccctggcatcctgtatttttatttgctcaatctggccaccataacttgatgcaattctacagtacctcatggacagtcaggcccagtgacccttcctagggtcccctcgagcctgaaagcatactccagtgtccacactgtacagtggggcagccgaagacaactgcggctgcagagaaagtgcgagtcccagggaaagaaaaaatgcaggtgctaagccaggcacagtggctcatgcctgtagtcccagcgctttgggaggctgatgcaggagcatcacttgaggccaggagttcgagaccagcgcgggaaacatggcggtactccatctctacaaaaaaaacccaaaaaaattagccaggcatggtggcatgtgcctgtggtcccacctactctgggagctggggtatgggggctgaggcaggaagatcgcttgagcccgggaggtagaggctgcaatgagacaagattgcaccactgcactccagcctgggtgacagagagagaccctgtctcaaaaaaaaaatttttttttaaatgtgggtgctattttgggactttgggcttttctcagcctcagtttcccctcctgcaaaatggagtagaacaattatcttcaaatatctgtgagagatggtgtttatgagacacttagggcaaaaaggcaatcatcctcaaaaaagaaactgacaactgcagcggctacctgcttttgtaagtaaagttttattggcaccagggccaggattaaagggaggcaaacaaggctgagtggtgcaaggacaagggtctgatcatgtcttaagagttttagtgttttggccaggcaaaacaccaaaactctttggcctgcaatcccagaactttgggaggctaaggtgggtgaatcacctgaggccaggagttcgagacaagcctggccaacatggtgagacctcatctctaccaaaaatacaaaaaatcagcctggtgtggtggtgggcacctgtagtcccagctactagggaggctgaggcatgagaatagcttgaacccaggaggcaggggttgccgagatcatgccactgcattctagtctgggcaacagagagactcgtctcataaattaaaaaaaaaaaaaaaaagttttggtgttttggccatatgcggtggctgacacctgtaatcccaacactttgggaggcctaggcagaaggatcttttgaggccaggagttcaagaccagcctgggcaacatagtgagatccccgtctctaaaaataaaataaaaaataaaagttttgatgttttgttcatcataaatgttttcattaattttatgtttttaaaatattatttctcttgatggctgagttttgtggggccaccttaaattttgcacaggggtgagatcctcactcgcctcaccctagaacccgttctgctgtgtgtactgggcacattttttgttgttgttttgtttttgtttttgagacagagtctcgctctgtcgcccagtctggagtgcagcggcgctatcccggctcactgtaacctccgcctcttggattcaagcgattctcctgcctcagtcttctgagtagctgggattacaggcgcgcgtcaccacccccaagtaattttttttttgttttgttttggttttttttgtttagtagagacagggtttcaccatgttggccagggtgatctcgaactcctgacctcaagtgatctgcccacctcggcctcccaaagtgctgggatacaggcgtgagccactgcgcccggccaatgcgctgggcatattgattaacctatcttagcctcagtttcttcatctgcaaaatggggctgaacgatgctgccttacttctgagaggattcatgcaaaatatttacttctgcgctctgctggaggggcggggccagctcgcccagtgggggcggggccctgtggtcgggctccccgggaggggcggggccaggccgtgtcagctgaccggcctggccaatggcacctggcggcggggcctggcaggccggggcggggccgggggcgggcctggcggcgcggactcccgggccatggacgagtcgagcctcctgcggcgccgcgggctccaggtgaggcccctgcgcgggcgggcggaaggcagagggcgcggccaagtggacgcggcctgaaaggtgccgggaggggcggggccttcacgggctgtagggaaactgaggcagagggtggggaacgctcagatcgcttctttttgaccacccgcttctcaaagtgctttttctcatggtgggaagggggaaggtgcccccttggacatctagggaaactgaggctccaagcgatggcgtgggaggaagaggctgagggctctgcccctccccaccagctgttctaataataatgctagcaacagcagccagagagctcaccatatgttcatggttgttttagtcctattactagcgatgtattaatatgagttcatatgtattaatacctccttgggtcgtcgctgcaccactgtacaccctcagctcagccctacgacgacctggggaggttggggctgtcaggcgcccatttgtcagaataaggaaactgaggctctagtcccggaaagccactctccagaggtcgcctagctgggattcgatctgcgccctcaaccagctctcttacggcacaaggcgctgccaaccagcagtgtgacctggggggagggcacccttgcttctctgggcctcagttttccaatgagccatagggtcctccttttactgagtttatgtttaggaggctgtgtcatcaggaggtagggacacaggcgtcggggacagcagaagcctaagtttgaagccacacagggactacatgaccccgggcagccaccctttgacttctctgggcctcagtgtccccattataagaaaagaaaaacaggaattaagatttggccattttcctctgggacttagaccacacccttaagaagccaccaagttttcaggtagggaacctgggattcagcacttacccaacgaacatttatggagcgcctgctgtgtgcctggctctggagaggcagcggagtgttctgcaacctctggagctgccctcctagaaaccccaacctgttgggggaggtagacgccagagcagcggtgaccccacggagtgatcagttgtgataagggactcacagcaagtgaaggaggcgcctgacccagtcattgctgggagccctggggtagaggaggcagccaagggtggcgaggcattgcagcggggggcggtatttagggaaatgaaagaggttgacagaagctggaacctagggaggactgagcaggtggggtgggggtcggggactgaggttagctccgggcgggttgagggggtgagaggaatggggccggcgggtctccaacctggagccgcaccggtagctgcgggactgcgaactcagcaggtgatgggaagccaggtcgggagtggtcagggaaggcacgggctgagctgcagatcagagacacccggtctctggccgcgcgggggtggggcagaactggaggcgctgaggccagaggcaagagtgggggacttgggcggaaaggagggggcggggcgggattggcgagcagcgtggtgttggtgggggggcagtcccgcctccagccccagttagatgccaacccgcccgcagcctcttaaaatagagaaaccgcctccgggtaggcgaatgggggtgctgctgacgtcaagaagtggggcctgttccatggtgggggggtcaaacatttcctgatggtaagttctatgttacaaaaggggaaactgaggttcagagaagcatagccactgtccgggtttcacaaagtataggtgacagagtcagacaggatttgaacccacgcagttccggcttcctctccaaaccaacccagcacaggcgtccctccacgaaggtggagggatgagcacggattccccgactgaatgagggcattccgggcagaggccacagcacgtgcaaaggcccagaggcatgtagcctttcttacctgtttatatggggaaacaagaacttgaacctatttcttagcactagaggctgatggccaggacttaatgcttccagggccttcagtgctgattttgaagaggttagactttccccctagggtgatggggagctatggaaggtgctggagcaggagaggacatgcccatattgaggggctgggaagactcctctggagggctaggagcaggagtgggggaatcaaaaagggcaggaagccaggaaggagcatggaatgaaagtctaagtgtaccaggtgtggtggctcatgactgtagtcccagctactcaaggaggctgaggcagaaggatctctctctctctctcttttttttttttttgagaaagaatcatgctctgttacccaggctggagtccagtggcgcaatctcggctcactgcaacctccacctcccgggttcaagtaattctccctgcctcagcctcccgagtagctgggattacaggcacatgtcaccacgcccggctaatttttgtatttttagtagagacggggtttcgccatgttggccaggctggtatcaaactcctgatctcaggtgatccgcccacctcggcctcccaaagtgctagaattacaggcgtgagccaccgcgcccagccaagaaggatctcttgagcccaggagtttgaggctatagtgagccatgatcacgagaccctatctcaaaaataaaaataaaggtccaagtggaagaagattaaaataataataaaataatagtaaagtgggaataaccgttcatattaacaggctaagccctctcatgcattcaattctcccaacagcccgagtggtcagtgctattattagttccacttttcaaaggaagaaactgaggcccaaagagggaagtacccaccaggaagccagagaaattctaaccaatctggcacgtgaaggtgttgtcttcatcagccccagtttggggtctcttttgactggaaaccttgttaatggtccaggagcaccccagccaatcagggggtagatcgctgatgcgagccaatcagatttcctggaggccaaaggccaaagagtccattcacaaacgggtgctgaccggccaatccagacgcatagcccagggcgtcctctccggtggtgacaatgtgaggcgtgctgttggctgtgtgcaggaaaggtctgaaaaaggatccggcctggcccgcgggcggccagtttgcgacagccctgggtccagggaggaggtggagaccttcccaatttgggttaaactcagcctcacgcataacgtgtgcaggcaccgggtaacgtgagctgttattactactactactattatcttattacatttatcatctcctacttggacctttgctttacacatgaccgaatttcaaaacaccaggtcccacaaacagagcatcccccggcagagaagggctagagcctgtatctggacttttgtctctgccgctactggggtggctcctctaggttcagccctccaaggtgatcctgctttctcatggacagcttccacttattttcctcctcctcctcctcctcctccttctccttctcctcctcctcctcctcctcctggaagccctggggctggtgccatgtggtccatgctgacttctctcccatttaattccaggggcatcgaacttccaaccgggcttggtgcccagcaggctgagtctcacctccctttgcacgtgctgtttgctgggcatggactggtgttttccatgtgcctgcaggctttgtttgacaccccctactccaggaagccccttagctctcctctctgtgtgcctccaacccctcttctccctttgagtctctctttttttagacaggatcttgccctgtcgcccaggctggagtgcggtggcccaggctggagtgcagtggcgccatcttggctcactgcaggctccgtcacctggatacaagcgattctcacagcctcagcctcctgagtagctggattacaggcgagcgccaccacacccgactaatataatttttatattttttagtagagatggtgtttcaccatgttggccagaatggcctcaaactctttttttttttttttttttttttgagacggagtcttgctctgtcgcccaggctggagtgcagtggcgtgatctccgctcattccacctcccaggttcatgccattctcctgcctcagcctcccgagtagctgggactacaggctcctgccaccacacccggctaattttttgtatttttagcagagacgggctttcaccgtgttagccaggatggtctccatctgctgacttcgtgatcctcccacctcggcctctcaaagtgctgagattacaggtgttagccactgcgcctggccttttttttttgaaacggagtttcactctttcgctcttcttgcccaggctggagtgcaatggcacgatctcggctcaccgcaacctctgcccccgagttcaagcgattctcctgcctcagcctcccaggtagctgggattacaggcatgcgccaccacatcctgctaattttgtatttttagtagagacggggtttctccatgttggtcaggctggtctcgaactcctgacctcaggtgatctgcctgcctcagcctcccaaagtcctgggattacaggcatgagccactgcgcccggccaccttttttttttttttttttgagacggagtctcattctgtcacccaggctggagtacaatggtgtggtcttggctcactgcaacctccgcctccggggttcaagggattctcctgcctcggcctaccgagtagctgggactacaggcgcctgccaccacatccagctaatttttgtattttaagtagagacggggtttcactatgttggccaggctgatcttgaactcctgaccttgtgatccgcccaccttggcctcccagcgtgctgggattacaggcgtgagccaccgcacctggctcaaactcttgatcttaagtgatcctcccgcctcagcctcccaaagtgctgggattacaggcatgagccacagcacccagctgcttcgggtctctcttaatccctccagtatgggggtgctcctgctgtgctatgtcttctccaaaatgggatttcctcaaggtggggctaaagcttgttggggaggcagcatcccccagcctgggcaagcgcagacgggtataccataaatattacctttaaagggcagtttcagggggtcggggcctccccaacctccactcctctgggtgggaaccactcccaggggaacagcaggcacagagggagctgtgggtggaaagcagatggtgcggggaccgaagggtccgggagtggtgccaggagagttctgtgtggtccagcttccccgggagcctttgcagggagctgccgattttgcctcacctctctctgccactttaaaaaaacatcttcaggccaggcacagtggctcatgcctgtaatccagcgttttgggaggccgagatgggaggactgcttgaggtcaggaggtcaagaccagccagaccaacatggtgaaatcctatctctactaaaaatacaaaatcagccaagcgtggtggtgggcgcctgtaatcccagcttacttgggaggctgaggcagaagaatcgcttgaacccaggaggtggaggttgcagtgagacaagatcgcaccattgccctccagcctgggcgacagagcaagtctccatctgaaaacaaacaaacaaacaaaatattcacatctttttgtcttttggaagcaactttcaactggtggttattattcacgtcttgatcattgtcttgactcccatccatccaagtctcccccagcaccaggctctgagcttgctactcattgattcctccagggaccctatgtcactgggccattttccaaatgagaaaactgaggcacagaggggttaagtcacttgtcgggtcacacagtgcaggagtgggggagccagactgggaacctaggactgtcagagttttggaaggaaatgcctggatggggtgcaagtgggaccccccaccagggttcaaatccctccctgtttcacgtggggtagtggaggaagtggtataagatcccacaactggctgggtgcagtggctcatgcctgtaatcccagcactttgggaggccaaggcaggtggatcacttgagaccaggagttcaagaccagcctgggcaacatggtgaaacctcatctctataaaaaatacaaaaattagccgggtgtggtggcacatgcccacaatcccagctactctggaggcggaggttgcagtgagccaagattgcaccactgcattccagtctgggcgacatagccagacgctgtctcaaaaaaaaaaaaaaaaaaaaaaaaaaaaaaaaaaaaaaaattcccacaactattggaaggggaagaaggagaccctaatggccacggtgatggtggtgatggttccatcaccatgactgcttgaactaaacgccgtgagttgtctgtcctcagacatattcaagcagtcagagagaccttcgaggggtagattattctcctcccatcgtgacagcttggttttctgagcgcagagcagctgaagtcaggcctggggtaacgccacacccccgcgacccttccccgcctctcccgggagaccttgccctcccagctgggtcatccggcagcccagcagcttccggccccctccaattggctgtaggggccgatggcgtcactggttgctatggcgaacacccagatcacgacgtgggcagcctggagcccaccaaagtaaaaatagtcgtgtgtccccaacgtggccgccctgatgtgtgtggagggagggtgtcctgagacccagtttcctgcctctcactccactaagagacgtgggcagccggctttcctctgcacctaagtttccctgccagtaaaacagcccctgcccgcggttcgtaggaggtggctcagtaaatgcaaggacatttaccaggtattatgacagcttccatggtcccttgctgagctcaacaatagtacaacagcacacaacagcagcaatagtaatggctgatcatgattaacccagaaccctcctcacgtcatctccagttacagatggggaaactgaggcacggggcatacaaataatttgcatggccaggaagaaacagagaattgaactggacccaggtctgggtgtccccagattctaaacttgtgccacatggcattttgagaatttaataaaccctcgtgattgaccgggtgcgatggcttacactgtaatcccagccctttgggaggctaaggtggatggatcacttgaggtcaggagttcgagaccagcctgggcaacatagtgaaacctcgtctctgctaaatatacaaaaattagccaggcatgctggcacacacctgtaaccccagttacttgggaggctgagtcaggagaatcgcttgaacccgagaggcagaggtttcagtgagccaagactgcaccactgcactccagcctggcgatacagtgagactccatctaaacaaacaaacaaacaaacaaaaaactggttttttggccaggcatggtggcttatgcctgtaatcccagcattttgtaatcccggcattttgggaggccaaagtgggtggatcatctgaggtcaggagttcaagactagcctgggtaacatggcaaaaccctgtctcttctaaaaaaaaaaaaaaaagtcccagctactctggaggttgaggcaggagaatcgcttgaacctgggagacagaggttgcagcgagccgagattgtgtcattgcactccagcctgggcaacaagagcaaaagtctgtctcaaaaaaacaaaaacaacaacaaaaaaaaaccctcttgggcagcccatgtctgaggatggactgtgaggtcacagtggaacacaagctcacggctttctatccttcatgcggtgagggcacccagagttggtgcaggtcagtttgctgagctctaaaagggtcttcaaaagggagtcacccgtcagccgtcctccccacgcccccactggtacccagggcccaaacctgcataggctttgcagcgagtgaggagagaatggcgttcagacctagacccaggaggagagggacatctgagatgggacagggagaggacaactcaggaatctctgttttctcaacagattattagtttttagccactactgacatacttcttcataaatacaactaattggtaattttaaataaaattattattaattttttttagacttagagtcttgctctgtcacccagactagagtgcaatggtattatcatagttcactgcaacctccaactcctggggtcaagcaatcctcccacctcagtctcctgagtagctgggattgcaggcgtgcaacaccacacctggctaatttttttttcttttttgagacggaatctctcattgttgccaggctagagtgcaatggcaccatctcagctcactgcaagctctgcctcccaggttcaagcgatcctcccgagtagctggggctacaggtgtgcaataccacgcccagctaatttttgtatttttagtagagacagggtttcaccatgttggccaggatggtcttgatctcttgaccttgtgatctgcccgccttggcctcccaaagtactgggattacaggcatgagccaccgcacttggcccttcttatttatttatttatttatttatttatttatttatttatttatttttgagatggagtttcgctcttgtttcccaggctggagtgcaatggtgtgacctcggctcactgcaacctccgcctcccgggttcaagcgattctcctgccttagtctcccaagtagctggaattacaggcacccaccaccatgcctggctaattttgtatttttagtagagatggggtttcaccatgttggccaggctggtcttgaactcccgacctcaggtgatctgcccacctcagcctcccaaagctctgggattacaggtatgagccactgcgcctgaccggcccggcctttttttggagacagggctcaagcaatcctcccacctcagccccccaagtagctaggagtacaggcttgagccaccatgcccagcaattttttttttttttttttttttttttttttgtagagacggggtttcactctgttgcccaggctagtttcaaactcctgaactcaagtgatccatccgccttggcctcccaaagtgccagaattacaggtgtgagccaccgcacccggcctactctggctaatttttttaaaaagttttgtagagatgtagtcttgctatgttgcccaatctggcttaaacttctgggctcaaacaaccctcctgctttggtctcccaaagtactgagatcacaggtgtgagccaccgtgcccagcctaaaatattttttaatgcaggtatggtaggagccgggtggggaattagactgtgaatctggagggcctccaggaagaaaggatgttgagttcagatctggagtatgagctgcagttaattagggccagaagggagggaaggctgttctgagagagcgcacagatagcgcaaaggccttgaggcagggctgagccagtgtgtagagtgagcgggaaagatgcattggttggggcatgggattggggattgtgggggtgcatcaacggccaggggttctgagggctagtctctctgagaatgatccccatttctgtctcattgcagaaggagctgagcctgccacgccgaggacgtgggtgagttcacctgggactggcgggctgggtgggccccagtggtcttggaagtggatatttcagcaacagccactgaattgtgaatgtatttaataattacagcaacacatctcatgttcattcttgccctcgtgtttgcaaagtgcttcacaagcacctggcctctcaccacaaacatgggaggccatgccagtttgcaaatgaggaagctgaggtgcaaaggggtttcatcaccagctaaggacactcagctgggaaggagagaaacttgtctggaatccagagtccagatgttgaatttcagctgaagtgtattagaactggcttgaatgcctctcatgacggggagctcacttccttttggggaacaccagcagaaaatcatctctcagctaggcacggtggctcccgcctgtaatcccagcactttggaaggctgaggcaggcagatcacttgaggccagaagttcaagatcagcctggccaacatggtgaaaccccgtctctactaaaaatacaaaaaaattaaccaggcgtggtggtgctcgcttgtaatcccaggtactcaggaggctgaggcaggagattcgcttgaagtgaggtgaagattgcagtgaaccaggctcccaccaccagacttcagtctgggcaacagagtgagactctgtctaaaaaaaaagaaaagaaaaaaatcatctctctcgggatcacatcagtgttcctgtaggttgggtttttttttttttgttttgctttgttttctttttgagacggggtccctctctctctgtcacccacatagtacagtgcagtagtgtcatcttggctcactgcaaccactgcctcccaggttcaagagagtctcccgcctcagcctccagagtagctgagactacacatgcgagcctccacacctgacttgtatgtttagtagagacagggtctcactatgttgcccaggctggtctcaaactcctggactcaagcgatctgcctgcctcaacctcccaaagtgctgggattacaggcatgagccaccatgcccagtctaggttaccattttttatccccaaatcttagagaacattattgttcaatgctttcattcatttacagatgaaagaaaccaaaggccggggtggggaggggttttccttgagctagtggtctggaagtgtgtgactgtggacaccccatctttgggagctgcttttgcctgagttgggggtgggaatcactcaatgaacatttttttgagcacctgctgtacactgggccctgctgaagccagaggggatacagacaattcaatctcagagcaatggttgaagttttgtactcaggagagagctcaaccagagaaagagacagaggtgctgggggtggctttatcctgaagatctggggcctcttggaggaagtgacctttgagcttagatctggaagaagaggaggagctggcagcggggaagtctggggagaatggcattccaagcagcaggaacagcttgggcaaagtttctggggtgccagtatgcttggcgttagaagaacagcatgaagacaagggtagctgagtggagtgagtggagatgaggtggcaggacagaaggaggaggtcctgggaatggggtcagagtggcccccaatcccaggccatctgcttctgttccagtggggatgatacagttggtggggaggtgcttgaaggccccagtggttgggggttgctgggggactgggacattgccccgagagccggcactgtttccagccttggcccaagctgtgggcagagtgttggaccgtgaatcaatgaggactgccgagggcaaagtcctggaccttggggcaggacagagccaaagactccacaagggatgtccactccctgccaccttccctgtgccccactgggtccaccggggcctcaagagggccagagtgagacacagacacccccagaccgtggggtttgcgctgagagggaggaaggacagagctggcggcgcctggtgctggtgggggtgcaggtacagcttggcggaggaggggctggtggggttgggatcgtatatgggtgagggggcgaccttcctggcagaggaaacagctggaagccagggactggaggtgtggtcagagcctctagtgtgcgcggggatgcggagacccgagcgggttaggacctcagtgctgagcagctggccgggatgcggggttggggagttggggcggactgcgctcagatcccggctcccagagagccccagggccggggcgagggcagaggccgggccggggcggggagaggcggggtcaggccatggagcaatcgcgcggaccgcggagccagtgaccgcccttcccttccggggcgcagctcgggggctcccaagccggcggcctcggcgtccctgcggcagacagggcggcacccgcggctcccctttcccgctgcgcgaccctcgctgccgggccgggcctgcgcgcaggtgcggagctgcgatccccgccccgaggcggagccagcccggcccccagcggcccagcccccgcgtctagtctgccgcaccagccaggcgtctgtccctgcgtccgtgtgtccgtccgtcggtccgctcgcgccacgatcagggcttccgggggccaacaagggggcgtcggtaccccgccgcacagaggcggcctctgcctcggcatgaagtcccgcagggacaagctgcacatcccggcgctgaccctcgagtgagtgttgggcagggcgggggtatgcggggtgcagggaggacaggatgacaactaccctccccccacgtctctgttcgtgtcgcccagaaacgcaccgccgcctccggggagccctcccgggccatcggtctggccccgccctcacgtcctgagctgaacccagaatccccggtcttgggcccctactccctgagggaaccgcagccgccatccggagatccggattcggccacacgaaggggcggccgccaggttcaccgtccccggcctctttctttgcagtctgtctccgagcagccagagcccgtccctgctgggtcccagcagcccctgcagcccctgtagcccctccttgggcctgcacccctggaggtaagtgacagcgcgtgtgggcggggcgcagacatcgccctggcaccccagagccttggaaaccctccagactcatcggtctcctcaagatactgcaggttggtgacatcacctctctgggcctcagtttacccctccacataatggcactgcgatacgttctaggggcttaatgggaaaattccatttttagccaggccagcatctgacaggtggccaaggaaagggaagaacttaagctgttgcccaaggacttcgccaagacaggtgccggattcccaagcggctcagggcactccctgctgaattggcctggactcctgggtggtgacctcagggagaaagctcctccctctaaaacacacgcacacccaaggctgagaggccaccaacgagagccctgtgaattgagattaaccaaagtggcgccgggagaaaagaaccagggtgactgagcgctccctaaccctttcctgatccctacttcccagttaagaaaactgaggctcagagaggagatgccagttttcctgattcagtccatcccccgggggccaagcatcagggacagctttgctaccaggtctgttgagggttctactggccagttggttgactctgtgactggccaggtttcaggacaggaaggagttttgtgagctcctctcatggtttgggcaaaagtttagggagggacagatgtgaggtcaatggtgtctgttagagttatgtggcccatcaaccatttacactttagtatgaatgagctgcttaactctttccacagacttttttttttttttttttttttgaggcagagtcttgttctgtcccctaggctggagtgcagtggtgcaatctcagcttactgcaacctccacctcctgggttcaagcaattctcctgttgtagcctcccaagtagcagggactataggcacctaccaccacatccagctaatttttgtattttagtagagatggggtttcaccatgttggccaggctggtcgcaaacccctctgcctcagcctccccaagtgctgggattacaggcataagccacacgctgggccatccacagacctttaacggggagaagagagaacaatatagagcccacatttgggtgctgggcaacagggaggtaccttccttcagacgccaagcacttatgaggcacctactgagatccaggtgctaaaggcattgctataaagaaaacatagtccctccatcaatgacttctcagtcagcttagggaattcagtgataaaactaatggataaacaagatgtattcagacagggacctcttggggaggtgatgtttgagccaaggcctgggcacagctaaagaaagattggcaccaggcagtgggtactgcatgtgcaaaggtcctgtggcaggactgaggtggtgggttttttgtttttgttttttgagacagtctcactttgtcgcccaggttggactgcagtggcatgatctcggctcactgcaacctctgcctcccaggttcaagtgattctcctgtttcaggctccgagtagcggagactacaggcgtgccaccacgcccggctaattttttgtttgtttgtttgtttgtttgagaagggatcttgctctgttgcccaggctggagtccagtggtaccatcttggctcactgcaacctccgcctcctaggttcaggtgattctcctgcctcagcctcccaagtagctgggattacaggcacacaccaacactcccggctaatttttgtattttcagtaaagatggggtttcaccatgttagctaggctggtctcgagctcccgacctcaagtgattctcccgccttggcctctcaaagtgctgggattacaggcatgaaccaccaagcctggcctaatgtttgtatttttagtagaggtggggtttcattatgttggccaggctggtcttgaactcctgacctcaggtgatccacccgccttggcttcccaaagtgctaggattataggcgtgagccactgcaccccgcctgagattttttttaagcctctgtgtctgccttggggggagaaagttctgctggggccaggaatggaggtggccagagagaaggaggtggctaggacaacatccaggaacaagtcgaggcatccactgagaatcagagactgccatcacccccatttagtgaagaaaacaggggcataggacctcagaatgtgttatcaggagcatcctaggaaggtttcgggccagatctgactctgtctaaatccttggcttccaccccaggtgaggacatgatgaagggagggacccgtgtgttggaggccgctgagcagatttgaccagttttaactgggaggggagggaggaagtatctgggactgagaaaggccataaggctgcctcactcaccaccggggggcagcagagccacattgccttgggcctggcgggggaatgggtccctgcctgccatgttccaagcatcctaggaataagctcataaacgtcccaacagagtccagcctctgcaactcccctgcctcctttttttttttgagacagtctcgctttgttgcccaggctggggtgcagtggtgtgatctctgcttactgccacctccgcctcctgggtcaagcgagtctcctgcctcagcctcctgagtagctgggattacaggcatgcaccactacactcagctaacatttgggtggttttttttgtttgtttgagacggagttttcctcttgttgcacaggctgcagtgaagtggcacgatcttggctcactgcaacctccgcctcctggattcaaatgattttcctgcctcagcctcgtgagtagctgggattacaggcatctgccaccactcctggctaattttttgtatttttagtagagatggggtttcaccatgttggccaggctggtctcaaactcctgacttcaggtgatccacccgccatggcctcccacaatgctggaattacaagcgtgagccactgcgcctggcctgatctttatatttttagtagagacagggtttcaccatgttgaccaggctggtcttgaactcctgacctcaggtgatccacccgccttggcctcccacggtactggaattactggcatgagccattgtgcctggccttgcaacttccctgcttccatcctatccatctccccgtcgctcacttggctccagccacatggctgatcctccagaatgcaggctggtccagcctcagggcctttgcacttgctgtccccactgcccagagctctgttccctcctttcttcttccgtcacatcctcatcaaggcctcagcctcagataggaagccttccccaaccaccccctccttccaggccccacaaacatggggtataatatgcattatacctgtccatttccacatccagaccccagggattttctttttctttttttttttttttaagacagtcttgctctgttacccaggctggagtacagtggtgcgatatctcggctcactgcaacctttgcctcctgggttcaagtgattctcctgcctcagcctcgagagtagctgggattacagacatgcgccaccacgccctgctagttttgtatttttagtagagacagggtttcaccatgttggccaggctggtctcgaactcctgagttcaagcgatctgcccatctcagcctcccaaaatgttgggattacaggcataagccacggcacccagccaaccccagagatttaatttccacattgtcttgtgtgattatccagttatttttctcacccagaggtttgacagcctctccgagaccagaccttgtctgtcctggtcatatcgtagactcagggcaggcccagggtgtatacagcaggtgctcagttaatgcatgtggcttagatgaatgggcagtatctgggagggctgtccttgtggtagtgatagcattgggggttgggggtgttgttgaagaaggccatgagttgggcgctcataggcaaagtggctgttccaggcagcaacagcatcgtcagagacactttccttctggagcctcaaatcccaagggcaggaagaatgtggattttctacctagggcactaggagccatagagtgtggtgctgggagcggcacagatatatgggcaggtgggaagcgctggggtagtcccactaaaaagggaccgttgaacgggggtgtctgtatatctacctgagactttggcatttacagtcacagcacatgcagggagagtcaaatgccaatgtcacagagtttgtcagggacagggctaggatatgacccctgggagagggattcacccaggaatgcagttttgttttgctgtgagagcaatagggagccatggagggtttgtgagcagggggaagggcatgatctggggagcagtgggccgacaccagagatcagtggctcagccagcctttcatggaaggccttcaccgtggcagcaggccctctggattgtcagctgcagccctgttttgcagagggggaaactgaggacaaatgagcatgggagaaggttctctccctgctacagatgtcagggcagtgggtgtatgtaatagggggtgtgtaggtgttactgggtgtagctgtggctggggacgagggggcagcgcctttaccgagtgtgtgcaaaggtgtgtccccgtgcatatggggtggctcagcacgtagtgacagcaagtggagactgtggccccatccccacttgggtccccagactcaagagaatctgcaccccgcatgaggcttgggctgcatacctgggggtcataggtgaccactcccatactcatcaccatctctggtggtctcaaaaccaccatctcccctggtctcaaaacaagtcccaaatccacccacttttctccacagcttcaatattcccctcccagacaccgtcccagacccttactggcctcctgctaccttcattcctgtcccccagcagtctgctccccatagcagacacaagggggtttacaaacgtagtccacatcataccctttctctgctcaagcaccctccatggctccccattgctcctacaatacaattgcactcctccctgcagcccacaaggcttatgtggtcagccccgctggcattttgccctcagtgctgcctcagagagttgtgccctttgcctgggacacgctttctgcatagccagctccttcctcctccatttctggctggctgcagcattacctcctctgagaggcctcctggctaaagtcgccccttgcagtgttctctcctttctcttcccttctcagccttggtatttgaaattatctttttttttttttttttttttgagacggagtctcgctctatcacccaggctggagtgcattggtgtgatctcggcccactgcaacctccacctcccgggtacaagtgattctaccacctcagcctccagagcagctgggaatacaggcatgcaccaccatgcccagctatttcttttgtacttttatttcttttattttttatttttttttatttttttgagacagagtttcgctcttgttgcccaggatggagtgcaatggtgctatctcagctcactgcaacctccgcctcctgggttcaagcgattctcctgcctcagcctcccaagtagttgggattatagggacgtgccaccacgcccagctaattttgtattttttttagtagagactgggtttcaccttgttggccaggctggtctcaaactcctgacctcaggtgatccgcccgcttcggcctcccaaagtgctgggattacaggcgtgagccaccacgcccagccgaaattatcttgctcattgaattgtttcctgttggctgggcaaggtggctcacgcctgtaatcccggcactttgggaggccaaggcgggaggatcacctgaggtcaggagtttgagacgagcctggccaacatggtgaaactccgtctctactaaaaatacaaaaaaattagctgggcgtggtggtgcaacacctgtaatcccagcttctcgggaggctgagacaggagaatcgtttgaacccaggaggcggaggctgcagtaagctgagactgcgccattgcattccagcctgggcaacgagagcgaaactctgtctcaaaaaaaaaaaatttgtctctttagctatgaagcctgggccccagcattgggcctggactgggtcccaaagtgtcctgtggcccaggaaggggcatccctcatgatgacactgcccctgacttgcctgggctgtcatgacaggaggaagcattaattcagtccttacggtgggagacacttctgcttccatagtgaacacatattgtaccctcagccctgttccaggctctgtgtctcagattttattctgttttcagtatgggggatgttacgcatggggaaacagaggcctggaagttagcctgatgctatcgtttatagagataaattatatatagatatggaacatataccaggtgcccttggaagcgcccccttacatctgatttgtgtaattctcatgtcagttcagttttcctccaatttcacagttgaggagactgaggctggagttcaatcaggtggctgcttcctaactgaggcagggctgatggcctttcccgccacacacagacagagcatgtcagacgccccgactcaatttgccaaacacaccctctatgccagtccggtgctgggagctgctgggaccctaaggagcccccagcctggggaagacatagccggacagacaggaaagcgggtttttcagaggagaggacgcagttttgccaggctagattccaagcagtggggccagggtgggcgtggtagcatgagccggccaggacgctggggtgggtcttgggtgccgcactgagaaggggtcagtgctctgggagagaggaaaaagatggagggagcgattagatttacattttagcagaaaggagccaaaatgcctgcccctagctcgaggttaaggtgctgccaacgccccgcccccgccgcccgcggtcgtagcaacgcccggcctcagccgcccgcggccctagcaacgctccgcctctccgcccgcggccatggcagcgccccgcccactcgccggcacgcgggtccgccggcctcgcttccgcgtcgctcgctccgcctcccgacaggccccgcccccaacggccccgcccccgcactcgcctgggcggagttccagtcgcgctcgggggcgcgcgcttccttctcgccgcccccccatccccgcagccccgtgcgcccccctccctgtccggctccgcggggctcctggggccgatcccaccgccgaggcctcccttcccggcctcgggcggctgcggcggcacaaagggaagcagcatgtccgaccccagctactggacggcggtggcggctcccggccatcggagccgcctggcaaaaggcgcgctgctgcagcgctccaagaggtagggggcacggcgccggcgaaggctcggcggccagccgagcaaacaggagttgccagaagtgtgtcctggccgcgtggcgcggaccacggcgagcgtctgtctgtggcagcagtgggaaggggggaggacgcctgtggatcgaggtgtcccctggggtccctggcaccctcctttcgcccctcgttccctggactggggtgtctgtccgccagcgtcgcagctggggtggtgacagacaggagtgagttgagattgagctaggatttgaacccgggtgtccagggctgggcagaaccagggaggaacttcttggaaaaactgaggctgatctgccgctgggggtccattcagcagaaatgttggctcagaagcaaatatttactgcacgaggctggcatttgggtggggtgtcaggagtccagatagttggggttaacccccgccaaagcctcaccgctcttggagtctcagtttccccttttgaaaagcagagaggataagtgagggctgtggattctaccagacctgggttcaaatttcgactcagccactaccaggctgtgtgacctcaagtagctccttaacctctctgtgcttgggtttctcattggtgctggactggggcaaagtctgggcggtgggaccagctaccgaaagaccttgaatgctgagtccagggcttaaacttacctccaagatcgtggggagcattggagggggaatatgggtgccagagggatgaggtgcaggaggctggcttcaggcccctgctttctgccacattctctctgttgtgtcctgggtaccaagagaggatcgttctcaaatggcaacttctcgaggtcctggatctcctccaggaagagttgaacaaacagtcggccctgcatagatgcttgggaagtgaacagatgatgcttagttctcctttgaggcctcacatttggccgtgttttcaagaagacctcgcccaagaacaggagggagggcaacgaagtgtttttcccaaatgcttttggaagcagcaagtgatacagcaggatcggggagggagggtgctggtggtgcagtgtgggggcgaggaaccaggtgaggggctgggagaggatgtggagacagccaggtgagcgtgcattgaggggttggcaggaagttttgcagaaacctgtgggtttcacttttgcttctgcagctcaggctgggagacaatcactgtgactgttgacatctgtggcttcagtttcccagtctggaaaatgggctcagctggtcattcccaactctggggcttgttggaattggcagatgttggggatgtaattcactcaggaggcactggctgccctcccggcgtgagccaggccctgtgagcattgtctaggcaaagacaacagtgtatgtacccgagtccgacccaaagctgagcactggatgtggtaggtttcatccttcaaggtagagatgaggaaacaggctcaaggggcagccacatgtggagacgtagacaggctgggcctcttctccctgcccaccttgtcacctgtgtcctttgatgatcatacgcttgttctcccatggattgacctgctccgagcattctgcctgggaccccatttctgcacctcggaggccccgagacttcatctctccctccccgcgagattctcccgccgctgagctgcgttggcggcttggggtgtgtgggctgatgctcttgtggagcagagctgttgctgggcaactgctctggtggggcgggggacggtgtcgctcccaacttccttctgtcaaggtgtgggctgaggccagggcccaggtgggagaagaagccaggcagggtgtgagagacctgggccagggatctggtggccagaagggaactgggatggaaagaggaaaacgtgggcaaaagttcagcagaagaggcaggactgtgaaagaggttgcatttagggtttctagttgggtcacattggcattttaggggcatcttgagaagaaggagggttgtcaagagatgggagcaggggcttcaagaggggtatatagaatggggtgtctcagcccatatctgggctccagggtgtgtttggttcacctgatttgctggtgctgctggcagtagccatggtacagggaaaagtgtgggggtgggactgtgacacagaaccctgaaaagctggtccaggggctcctggccatatgtagtgtcctccatcaggctagaagcacttcatgccattgctgttaataacaacactgccaatagtttgtgttggtttttgttattgtttttcagatgaagtttcactcgtgtcgcccaggctggaatgcaatggcactatctcagcccactgcaacctccgcctcctgggttcaagtgattctctgccccagcctcctgagtagctgggattataagcatgcactaccacacctggctaatttttggtttttttgttttgttttgttttgttttgttttttgagacggagtttcactcttgttgcccaggctggagtgtaacggcacgatctcaccacaacctccacctcctgggttcaagcgattctcctgcctcagcctaccaagtagctgggattacaggcatgcatcaccacgcccagctaattttgtatttttagtacagaaagggttcctccctgttggtcaggctggtctcaaactcctgatctcaggtgatctacccacctcggcctcccaaagtactgggattacaggtgtgagtcaccatgcccgacctaatttttgtgtttttagtagagacgggtttcaccatgtttaccaggatggtctcaaactcctgacctcaggtgatccgcatgcctcggcctcccaaagtgctgggattacagggatgagccactgtgcccagccttgtttttgtttttttaagagagagggccttgtgctgtcacctaggctggagtgctgtggcaccatcatggctcacggcagccttgacctcctgaggctcaagcgatcctcttgcctcagccttctgagtagctgggactacaggcgtgcaccaccacacccagctaatttttaaattttgtatagagacggggtcttgctatgttgcccaggctggtcttgaactcctggcttcagaggatcctcccaccttggccttccaaagcactggggttactggcgtgagccaccatgcctggccagcagtagtgtcaataataaggaatgttagttgaggggtgattccctcctgggccttgaagacctggctaagggccatgggggaacccagctgggggcagagtgggagtggccatgtccaacatcccatccttctccagaacgggctgcgagtgtgatttaggctgggcaggtggcttagcgcggggccctgggcagccacctaccctgtccccttttccccccacagctgccgcagcgggaaccgcaagagcttggtggtaggaacgccctccccgaccctctcccggcccctgtcgccattgtcggtcccaacgggtgagtgtgggagcagccagcgggtgctgtgtcctgcctctgccccgctgactcagtttccccgcctcctcctcagcaggcagcagccccttggatagtcctcggaatttctcggctgcctctgccctaaatttcccctttgcccggaggtgagtgattgccggctttgggagacagtgcgggcaccacgggcaagggttgggcaggggcacgtgctcggtggctagacctggctcctcattcatttcattcaccttttcccctcccctggcccgtctggtggtggtctccccctctggctcccattcccggcaaatgcatgccatcttgcagccacatcccacgcatggacaggtaatttcaaccagcccagggggtggggggtcatggggggatatagccctaagaatcattaactcactaaagaaatcattcattcattcacttaacaagagctgattgagcacctgtcatgtgccagacgcttgcatttcatttatttattcatacaacaacattcattaagcacccactgtgtgtatgctctgtgctgcgggctgagggcatggtcgcaaatgggcagctggccctgagcccctggggagtcctccgtttggtggggggtggtcaatgtgtgccccagaagctacagctcagaggttgaagctttgacaggggacacagtggcagctggactcacgggggggcttcctggaagaggtacctaaagagagagagcatgcagtggacttggtcagcctgtgtctctgttcttggttattttcaggagatccttcctacaacagggccagaatatgctggccacagtgtctgttcttagtccccacaaaccacaggggccaggccttccttccatctgttcttgttcccctctccagggcagacggcagaagatggtccctcgcgtctctcccatcttccggctatggaaccaacacacccagctccaccctctcggtacccatagccccaccttggcaggtggacaggcagatgccgggttgtggggggacacatctttgtgtgtttttttcaaggtgttggatagttgtgcagtcagcaaacatactagttacttcctccatgcacgccccattctgggaaatgcagggtcccctgagaagacccagccttggccccaaaatagtccctggttggggagatacagatatcctcagcctatggggtcagggcctgaccagagggggacttggggctgcccaggggtacaggcagagaggacttcctggaggagagggcatcagagctagggttttgagggatgcataggagctaggcaggagaaaggatgttaccttctgatggccagcaggcagcctgggccttgaggggtggtgctgggttcctggccacagcactgacggtgaactcatggctctgatccccaccactctctaccagtcaagctcatcctcccgggaacgtctccaccagcttcccttccagccgacgccggacgagctgcacttcctgtccaagcacttccgcagctcagagaatgtgcttgatgaggaaggcggccggtcaccccgcctccgaccccgctctcgcagtctcaggtgggccgcgacctctggccccagccccggcccctccctgggctggtgtggaggcccaagttgtggctcctccttcaccccagccctgaccctgcctgagcctagcctctgattcttgtccctcaaccctggctcagatcccccaacatcctcccctggggttggtctcaggtcccatatcacaagccagctgtcttcctttcagcccgggccgtgcaacggggaccttcgacaatgagattgtcatgatgaatcacgtgtaccgggagaggttccccaaggtgggcagcgcctggcggctggaccagcccctgcacttctttccacattgctgtccctccatggaactctgtcttcctggctatgtcccctttgccagtctgttcatttctgtctttccttccccttccgttgaaagatgtcgttcctcctgcaccagccctcccacccgatcgccccattgccccatctcctctctccccaaccatgcctctcctgccccattctgcgtgtgtcactccagccccgccctctgaccaggtcgccccgtctcgccccacccaggccacagcacagatggagggccgtctgcaggagttcctgacggcctacgcgcccggcgcccggctggcgctggctgatggcgtcttgggcttcatccaccaccagatcgtcgagctggcccgagactgcttggccaagtctggcgagaacctcgtcacctcccgctacttcctagagatgcaggagaagctggagcggcttctgcaggatgtgcgtggtttttcgcatgttgaggttttgcatgcagtgggacgtggagtgaggggggtccccaggccagacggtgctgaggacctgtgggtgatgccacgacccacctcccccaggcccatgagcgttcggacagtgaggaggtcagcttcatcgtccagcttgtccggaaactgctgatcatcatctcacggccagctcggctgctggagtgtctggtaagtttctctttctacggccagcttggggtccaggcagaactgagattgggaccacaacagtcctgccaagatacaggtgacagttcccatcgtgtagggctttgagaggaacacagggtgctattgggctagcgtgggcttccctaaggaggcagcgggagtggagacccagtgggtgagctgggaagggtgctccaggcagagggaacagcatgtgcagaggcctgcaggtggaaccaagccctgggtgaccagccctcctgtgcccctaggagtttgaccctgaggaattttaccacctgctggaggcggctgagggccatgcgcgggagggccaaggcattaagactgaccttccacagtacatcattgggcagctgggcctggccaaggaccccctggagggtaagccgggatgggaagaggaaaccaaggctgggaaaggccggatggaggccaggcacggtggctcacacctttaataccagcactttgggaagctaaggcgggcagatcacttgaggccaggagttcgagaccagcctggccaacatggtggaaaccccccccctactaaaaatacaaaaattagctaagtgtggtggcgcatgcctgtaatcccagctactcaggaggctgaggcacaagaattgcttgaactcaggagatggaggttgcagtgagctgagatcgcgccactgcactccaacctgggcgacagagcgagaccctgtctcaaaaaaacaaaaaaagaaagggcagatgaagccaggattcaaacccaggcccatccgattccagaaccaccgcactgttctttgtctctctgtggccttgctcttaggtcacctgtgggaattatgctgagaccctctgatcttttggggcccaggggcctcagtgtcctcaaatgccacgttaagatggtcaggaagcctggggaccagtgttagcagtggccttccctttgtcctgcaaattcacaaatgactttaccaatttctgtggcctttactgtggcccagaaagtgaacttggagtcaaacaggacaacccgtaggtaagaagacggtcaaaaactcccacagccggccgggtgcggtggctcacgcctgtaatcccagcacttttgggaggccgaggtgggtggatcacaaggtcaggagttcaagaccagccaggacaacatggtgaaaccccatctctactaaagatacaaaaattagccgggtgtggtggcgtgtgcctgtaatcccagctactcgggaggctgaggcaggagaatcatttgaaccctggaggcggaggttgcagtgagccgagatcacaccacttcattccagcctgggcaacagggcaagactctgtctcaaaaaaaaaaacaaacaactcccacagccagccaggtgcagtggctcacgcctgtaatcccataatcccagcactttgtgagactgaggcgggtggatcacttgaggtcaggaattcaagactagcctggccaatatgcagaaactccatctctactaaaaacaaatattagccgggtgtggtggcatgtgcctgtagatcccagctacttgggaggctgaggcaggagaatcgcttgaactcaggaggcagaggttgcagtgagccgagatcacgccactgtgctctagcctgggtgaaagagtgagcctacatttcaaaaaaaaaaagatgtagctgggtgtagtagtgcgcgcctgtagtcccagctactcaggaggctaaggtgggaagatcgcttgagcttggcaggttgagactgcagtgagctatgatcacaccactgtcctccagcctgggtgacaaagccagaccctgtctcaaaaagagaaaaaaaaaaatttccacaaatagccaggataagaggaactgaaagctggagcattgaacttggacctagcctggtccagcagtagccagggggaggctctgggaggaggcagtgttcaaactgaggcctggagggcaggaggtgaccaggttgcagatccaaaggaaagagtgaaacaggcagcataggcatagaccctaaggttggaccatacctggagtgggactgacctgccactgtccccattgaaagctggggaggcccggcatggtagctcacacttgtaatcccagcactgtgggaggccaaggcaggaggatcacttgaagccaggagtttgagaccagcttgggcaacatactgagatctcgtctctattaaaaaaacaattagccaggcatgatcgcacatgcctatagtcctagctacttgcggggctgaagtgggaagactgcttgagcccaggggtttgaggctgcagtgagctatggtcgcacaactgcactccagcctgggtgacatagcaagaccccatctctacaaaaagtaatttttttttttcttttttgagacagagtctcgctctctcgcccaggctggagtgcagtggcacgatcttggctcactgcaagctccgcctcctgggttcacgccattctcctgcctcagcctcccgagtagctgggactacaggcgcccgccaccacgcccggctaattttttgtatttttagtagaggcggggtttcactgtgttagccaggatggtctcgatctcctgacctcatgatccgcccgcctctgcctcccaaagtgctgggattacaggcgtgagccaccgcgcctggcctacaaaaagtatttttaaaaattagccaggcgtggcggtgaatgcctgtagtcccacctacttgagaggctgaggtgggaggattgcttgagtttaggagactgaagctgcagtgagccatgatggcaccactgcactccagcctgggtgacagagcaagagcctgtctctgaaataatcatacttggccgggtgcggtggctcacgcctgtaatcccagcactttgggaggccaaggcgggcagatcacctgaggtcaggagtttgagacgagcctggccaacatggtgaaaccctgtctctactaaaaatacaaaaattaggctgggcgtagtggcttatacctgtaatcccagcactttgggaggccgaggcaggcggattacctgaggtcaggagttcaagaccagcctggccaatgtggtgaaaccccatctctactaaaaatacaaaagttagccaggtgtggtggcaggcgcctgtaatcccagccactcgggaggctgaggcaggagaatctcttcaactcaggtggtggaggttgcagtgagccaagatctcgccactgcactccagcctgggcgacagagtgagactgcgtctcaaaaaataaaaatacaaatacaaaaattagctgggcatggtggcacacgcctgtaatcccgtctacttgggaggctgagacaggagaagcacttgaacccaagaggtggaggttgcagtgagctgagatcacaccactgcactccagcctgggtgacagagcgagactccatgtcaaataaataaattaaataatcatactaataaaaaataaagctgaggaaactgaggctccaggcagataaggctgagcagggaatcaaacccaggtgtacctaaggccagatcacatgtggtctgtggctggaccatgtttgccaggcattcgctaggggctgcccctctgccaaggcctggggcaagaacatattggaccctccacctgggctgcaccctgagctgaggaagatgttaggagctgacacccagggggcctgtgtctcatcccgtcttcacaggctcaaggctcagagcctaagtttgatcatgactgagcacttcagagccagggcagcccactggcccttctagaaggttcctaagtcattgcttcatccagcctcccggatgtggcttcatgacagtgtcatgagagctggtcaggggaggcactgcatccccagcctggggtgagaactctagaggcctcaggaaattgctgggtgatgcagggtgaggcagggaggctccagctgagcctcctccctcatcttgcagagatggtgccactgagtcacctcgaagaagaacagcccccagcacctgagtccccagaggtgagtagcagaggctgggggacccccgctcatcttgttctttccagagtggaccaggcacccgcagaaagggctgggtttgccgaggtcttgcatgtagcttaattagcatcggtgactttggaggcaaggtgacggcacgtgggactgccctgccttggaagtcgggtgggggcagtgctggaggggcactggacaggtgagttttgcaggacgtgtaagaatttcccaggaggagggcacagctgtgagcaaaaaagtacagaaagtcagaagctgagttggagaagtttggacaggggaggaggtagcatcgggcaccaggaccagtggtttgggcttgggggcaggagaagccttcccagctctgcagcggggcaggaccctaagcccttcccatcccctagagccgcgccctggtcggccagtcacggaggaagccatgcgaaagcgactttgagaccatcaaactcattagcaacggagcctatgggtgagtccctgagtcctgcatagacccatttcacagatgcctgaggggatggttgaggcccaggcagctcctgcatccccctcctaccccagcagggctcacacattcatccttgaatgggcagagaaggcacctgaggactggagggggaagtggagacacgccatagcgaggttacagcctcatgtgtgctctgtccacgagccaggcctttacctgccccaggtgtagggcgttctaggggcttgggggctgatcaaggaaatagatgcccacccagtgggagtagcacgcagtgagctttatttaggtgctgctttgaatggcaggcttgcatacaagggaagtccctcatagcataagccttttggaggctgaggttccaggagtcaccatcaagagggagaggccggcaagggaactccccgggcagagggggatcagagagggggcttacatgtctaggtgatgttgttcaacagcatgggcactcaatctctgggtcagagactccctgcagggtggtagcagcttagggtcttgaaatccacaaagttcatcttatccatggctcagagatggtgcagtttcacgagtctgcaaagcagacaggctctcagtggctaaaattttgcttacttggtctgtgtgtaaaacaaacggatgtgtaaaactttgagtttggtgctagcggtcttttaaaagagctagaccaggtgcggaggcactttgggaggccaaggtaggaggatcgcttgaggccaggagttcgagaccagcctgggcaacatggcaaaactccatcaatactaaaaatagaataattaactgggcgtaatggcacatgcctgtaattccagctacttgggaggctgaagttggaggatcacctgaacccaggaggcagaggttgcagtgagccgagatcaccccactgcactccagcctgggtgacacagtgagaccatctcaaaaaaaaaaaaaaaggaaagaaagaaagaaagaaatacacaagcagccaggtgcagtggctctcgcctataatcccagcactttgggagcccgaagtgggagggtcacttgaggccaggagtttgagactagcctccacaacatagcgagaccccatctctacaaaaaatttaaacattagccaggttctgttgtgggaggatcatttgagccgggggggtggtaaagactatagtgagccgtgatctcatgactgtgctccagcctgggcaacagagtgaggcgctatctcaaaaaacataagataaaataaaaataaaagaaacatacaacctagaggccaatatacaagggccatgtgcagcccatttatatggcccccagccatggtggcttaaacccaaaggtggctgctctgggagggggaacaggtaaggagaatgggtggcccaggtggagggcacagcacaggcaaaggccaggcaggttgggatctgggctcaagttgagctgtagtgcctgctggggcctcgatctccggtcccagcaagcctggccctctgtccccagggccgtctacctggtgcggcaccgtgacacacggcagcgctttgccatcaagaagatcaacaaacagaacttgatcctgcgtaaccagatccagcaggtctttgtggagcgtgacattctcacctttgccgagaacccctttgtggtcagcatgttctgctcctttgagacccggcgccacctatgtatggtcatggaatacgtggaaggtacgctcactggggcttgcatgcctccagcgatggggagctcacccctccacgcctgggagaaaatttttagaccaagttgaggtctgttctgtcctccatgaggtctcaccctgctttggggaaccctcaggaaccccagtctggggtagggagcccagccatgggggtttagggctggaggagcccagacaggagtgtgtgaggatgggaccctggaggcaagaggagggtggccatcctaggtggggggaactgatgggcagaggcctggagaccagaagtgaaggcagggagatgtatggttcaggcaggtaaagtactattaccaaagtactgccaggcgagagagcgaacatgcacttaggagacaccagctgtatacagcactaattgctgccctgtcggggagaatcagaaggcagggtctcagcttggcgcgctggctcacgcctgtagtcccagcactttgggaggccgaagtgggctgatcgcttgaggtcaggacttcgagaccagcctaagcaacatggcgaaacccccattcacgcctatagtcccagctactcgggaggctgaagcaggagattcgcttgaactctagaggcggagcttgcagtgagccgagactgcgccactgcactctagcctgggcaacagagcgggcaacagagtgagactctgtctcaaaaaaataaataaaaatttaaaaaataggccaggcgcggtggccaacgcctgtaatctcagcactttgggaggccaaggctggtggatcacgaggtcaagagatcgagaccatcctgaccaacatagtgaagccccatctctactaagaatacaaaaattagctgggtgtggtggtgtgcgcctgtaatcccagctactctggaggctggggcaggagactcgcttgaacccgggaggcggaggttgcagtgagccgagatcgcgccactgcactccagcctggcgacagagcgagactctctctcaaaaagaagaaaaaattaaaaaattaaaaataaatgaaggtagggtccgccccttccctctcccccgaccctccccgctgagatagaacaaactggggaccttttgcaggaggtaaagcgaggaggatgcataggcattgggcataacctaaggggcgggcggggggcgggggtgccccgggcctcatgactacatccgcccttctcccaggcggcgactgcgccacgctcctgaagaacatgggcccgctgcccgtggacatggcccgcctgtacttcgccgagacggtgttggcgctggagtacctgcataactatggcatcgtgcaccgtgacctcaaaccagacaagtgagctgagctagcatgagcggggcctcgcggagggcggggccagagaggatcaggggcggggccaaagaggatcagggcagagcctctgaggtgcatcccgggacccttcaggagccccatctgtctgagctctgttggtacctcctgacaggaaggcagggaatgagcgcatggtgaacatcttgtgtgtacagaggagaggagagcagacacttaataggcgtctgctgtatgcaggggaaggccggtgcacttatggaggtgctgccaatccaggggagaggatgtgcacttaggatgcacacactgtatacaggagaaggggctgcgcacccagagctgctgctgcacaaggggagagaacatgcacttataagacaccaactacacacacagaacaggattatgcaatttgcgagaccttacatgtaaagacagtgaccgtgcatgtcttgagcacctgctgtatattagtgcaggaaagcaaggaagagaacgtgtttactgagagccttaggatgtttattttattctggtaggtggtaagcacctactgcatgccagaccctctgtgggcaactgggagacacagggccacctgctttgaaacccctgtattattttctcctctgcatttattgagcgcctgctgtgtgcagggaaaaaggaatgcctgtttgtcaggtgtcctcgagatacgaggcaagaactgacatttctcacatacatgtgtggagatgtgaacatgagtgttaagagccttgcatgtaggccaggcttggtggctcacacctgtaatcccagcactttgggaggccaaggcgggcggatcacctgaggtcaggagttcaagcccagcctggccaacatagtgaaaccttgtctctactaaaaatacaaaaatcagctgggagtggtagcgcgcacttgtagtcccagctactcaggaggctgaggcaggagaatctcttgaacccggcggaggttgcaatgagccaagatcgtgccactgcacccaagcctgggcgacagagcgagactccatcttaaaaaaaaaaaaaagcgcctcgcatgttttcagggcattttgcagttggcaagtggcttagaaaacagacatgtatgtggcacctgctgtatacttgggcctgtgctcgatgctctaaggaactcagaagcatgaataactccttacacactaacgttgggtttctatatcacattttcttggttggcatgtacttgttaggcaccaggtgtatacaaaataggcagaagaacagttattaggcaatgactgtgtacctggcccagaacactttatctttatttatttatttattttttgagacagggacagtctttgtcgcccgggctggagtacagtggcgcagtcttggctcactgcaacctccgcctaccgggttcaagcaatattcctgcctcagcttcccgagtagctgggattacaggcatgcgccaccactacgcccagctaatttttttttttttttttttttttgagacggggtctcactctgtcgccaggctggagtgcagtggtgcgatctcggctcactgcaacctcagagtccctggttcaagcgattctcctgcctcagccttccaattagctgggattacaggcatgcgccaccacgcccagataatttttgtatttttagtagagacggggtttcaccatgttggtcaggctggttttgaactcccgacctcaggtgatctgccggcttcggcctcccaaagtgctgggattacagttgtgagccactgcgcccggcaaatgaactcatttttaaaactctcacgcaagtacagtatatactgctgtttaggttttcctatggacttaaatatataaatgttttgctacatcatagtgtcttatgcaccagctgtatgaagtcgcatttccgtgcaccttctgggtgcatctgccacttaaaaatacattccagagaattcactgtgtataaccatcatttaatgaactatgtagtcagtacctcctgtttgctccagctctgtaaagaaacaattctgtgccggcactttgggaggccgaggcaggtgaactacctgagatcaggagttcaagaccagcctgaccaacacggcaaaaccccgtctctactaaaagtacactaaaaaaatatatatatatatacacacacacacatatacgcacacacagtagagaccaggcatgctggctcacacctgtcatgccagcactttcaaaggtgggaggattgcttgaggccagcaattcaagaccagcctgggcaacatagcaagaccttatgtctacaaaaaaaaccttagctgggtgtggtggtgtgcacctgtagttccagctacttgggaggctgagcaggaggatcgctagggcccaggagttggaggcagagctctgcccatctcaggcggagccaaggtctagggcagaaggggaggccaggcaccccagccccccagctctgagcacactcctaacctgcccacagtctgctcatcacctcgcttggccacatcaagctcacggacttcggcctgtccaagatcggcctcatgagcatggccaccaacctctatgagggccacatcgagaaggacgcccgagagttcatcgacaagcaggtgggcgggcaggtgggtgggcagccccgggatgcctcctcctctctcctgggacctctcttgggctgggggctggcctcagtttccccgttctccctggcccaggtgtgtgggacgccggagtacatagcccccgaggtgatcttccgccagggctatgggaagccagtggactggtgggccatgggcgtcgtcctctatgagtttctggtgggctgcgtgcctttctttggagatacccccgaggaactcttcggtcaggtggtcagcggtgcgtttcctccacgggcctgggtttgagctgcagccccaccagagctctgggcagcggtcctccacccgcatgtcagggagagaagcaggaagaggggagggagttggatgccaggtggggaggcggtggggtgctgagtgaggcgggtggctggattaattatagggtcacagaggcttcactgaagtgacttgtgaggctgggcacagtggcaaacacctgtaattccagcactttgggaggctgaggcgggaggatcatataaggtcaggagtttaagaccagcctggacaacatggtgaaaccccatctctactaaaaatacaaaaattagccgagcatggtggcgggcacctgtaatcccagctacttgggaggctgaggcaagagaatcacttgaacccaggaggcagaggttgcagtgagctgagattgtgccactgcactccagcctgggtgacagagcgagactccatctcaaaaaataaaaaaaagaagtgacatgtgagcagagacctgcaagaacctgagaatgagagaaagccatagagacagaaaagagaaaggtggctctgagcatagggcacagctgtggcaaaggctgtcagtgggtaccaagcctgccacgttgcaggggcagaggaggccagtggcttggagtacagtgaagtgaggggaaatggtggatggtactagaaaggggtaccctgccttctccctccctccctcattttacctccctccctcattttagatgagatcatgtggccagagggagatgaggcccttccagcagacgcccaggacctcatcaccaggttgctccggcagagcccgctggaccgtctgggcactggtatgtagtgtgggggagaacccaggtgggtggctccttcaggccctgggacccagggaatggagggatagcgcccggggtagacaagagttctacttgggaagctgcatggaggagggggtttgcagctagggttttgaaggatgcacaggagttctccaggaactatcacaagaccttggaaagaatagaaagtagctgggtctggtgcccatatggagcactgagcctgaataagtgtgtgaggctgtaaagtcaccaggacctgtgtcaaaggcccagcccagaagatcccactgtcccagttttcccagccacctggttaatcattaagggaccgtttgagactcatgcagccacccatcacgtggccactatggctcctgttcatgactgaggctttgctatgggagacggttgggtccaaggtcggggatcatcacctgctctgtggagcagaagtgggagaagcccgggaaggaggccctcgtaaggctctgggctttctctaggcggtgtggtcccagatggcagcagagagaagggcagaatctttggaacctgggcagcctgggtgcttttttatttttttgagattagatctcactctgtcactcaggctggagtggagttgcacaatcttggctcactgcaacctccgcctcccaggctcaagcgatcctcccacctcagcctcccgagtagccggaaccacaggcatgtgccatcatgcccggctaatttttatacttttggtagagacgaaattgagacgaaatttcaccatgttgcccaggctggtctcaaactcctgacctcaagtgatctgcccgcctcagcctcccaaagtgctggcattacaggcatgagccaccatgcctggctgctggcctgggtttgaatcctggcttcgtccctctccaggctcctaaatgacagcggatttttgttcccatttttctggttctttgttgttgttgttgttgttgttttttgagacagagtcttgctttgttgcccaggttggagtgcagtggtgctatctcagctcactgctgcaatctccacctcccaggttcgagcgattctcttgcctcagcctcccgagtagctgggaatacaggcaccagccaccacacccggctaatttttgtgtttttagaagagatggggttttgccatgctggccagactggtctcgaactcctgacctcaggtgatcctcccttcttggcctcccaaagtgctgggattacaggtgtgagccactgcgcccggcccatttttctggttctgtgttgtccctactatgtgtccagcatgggcagtgggggtaggggggcatcctgtggcgggtgaggtgaggacctgcagggctcagcggggcatatctgcaggtggcacccacgaagtgaagcagcacccctttttcctggccctggactgggcagggcttctccgacacaaagccgagttcgtgccccagctcgaagctgaggatgataccagctactttgacagtaaggagggatccccctggagggggggcggggggtgctctgccatccctcagtccctgggggcagagggctgtgtgccaggcattccacccgagcttggcacctcaccttaggcctggagcttccgacttcctgagccttccaagaatctagggcgtgtgtcggccgccccctggctggatttcctgtgtgtctgggctcaggaggccacagcatccctcaggcttcagaaggagaaaccaaggcaccaagtgtggcagacccttgtctggggttccccagcaagttgggcctcctgggtgtccgtccctgaccaggcatggggccccatctgttacccaggagggtagggcgcctagtgcagcttttttggaggcgtccctgcaggggcactgtaggtgagctctgaggaatgactctctctctccccacttggggttcctgcccttcagtgtccagcacctccttcagaacttgcttcatgtcagaggtcttctctgagcttctgtttcctcttctgtaaaatgaggaacatcctttatgttggagatgcacaattttggccaggcgcagtggctcaagcctttaatcccagaactttgggaggctgaggtgggcagatcacctgaggtcaggagttcgagaccaggctgcctgaccaacatggagaaaccccatctctactaaaaatacaaaaaattaggcaggcatggtggtacatgcctgtaatcccagctatttgggaggctgaggcacgagaattgcttgaacccaggaggtggaggttgcagtgagctgagatggcactattgcactccagcttgcgcaacaagagcaaaactgcctgaaaaaaaaaaaaaaaaaaaaagatgcgcaattttacctaattctgtgtgacccatttcaaggaatcactgaagctcagaaataggaattcccgcccctggtcccacaacctgttttttttttttttgagacggagtctcactctgtcgcccaggctggagtgcagtggcgcgatctcggcttactggaacttctacctcccggtttcaagcaattatctgcctcagcctcccgagtagtcgggattacaggtgcctgccaccatgcttggctaattggtcccacaactttttaattatttattttttgagatggagtcttgctctgtcacccaggctggagtgcagtggtgcgatttcgactcaccacaacctctgcctcccgggttcaagcgattctcctgcctcagcctcccaagtagctgggattacaggcgcttaccactactgcccagctaatatttgtatttgtagtagagatggggtttcaccatgttggccaggctggtctcaaactcctgacctcaagtgagccacccaccttggcctctcaaagtgctgggattacaggcgtgagccaccgcacccggccccacaactttttagggacacagctggtgttgatccccagatatctgctctgccgcccaagcctcccgtggtccttaaacacaccaggcactgtcccacctcagagcctttgccctggcagtgaccctatcctgagatgccctccccgtattgccacaccgcccttgagatcatctctgggcatcaggcgtgctgcatgtgcctctccctcccacagcacgttcggaacgttaccgccatctgggctccgaggacgacgagaccaatgatgaagaatcgtccacagagatcccccagttctcctcctgctcccaccggttcagcaaggtgggcccgggtcccgaggggagccactgctcagaaaacattgcatgatgtctgtttgctttcgtatctgttttttgattttgctttgttttgttctgtagagatgaggtcttgctatgctgcccaggctggtctccaactcctgaactcaagtgatcctcccacctcagcctcccaaagtgctaggaattgtattggttttttgttttgttttgtttgagatggagtctcgctctgttgcccaggctggagtgcaatggcgcagtctcggctcaccgcaacctctgccttccaggttcaagcgattctcctgcctcagcctgccgagtagctgggattacaggcgcatgccgtcacgcccagctaatttttgtatttttaatagagatggggtttcaccatgttggccaggctggtctcaaactcctgacctcaggctatcctcctgcctcagcctcccaaagtgctgggattacaggcatgagccaccacacctggtcaaatttttttgtattttcagtagagatggtgtttcaccatgttggccaggctggtctcaaactcttgacctcatgatctgcccgcctcggcctcctaaagcgctgggattacaggcatgagccatcgcacccggccttgtatttttttattttgttttgttgttttaatttgcttttgttttagccattttttttttttctttttttttttttgagacagagtctcgctcttttgcccaggctggagtgcagtggcgtgatctctgctcactgcaagctccgcctcccgggttcacgccattctcctgcctcagcctcccaagtagctgggattacaggtgcccgccaccacgcccggctaattttttgtattttcagtagagacggggtttcaccgtgttagccaggatggtctcgatctcctgacctcgtgatccacctgcctcggcctcccaaagtgctgggattacaggcgtgagccaccgtgcccggcctgttttagccattttaaggcaatttccgaggcaggcggatcacttgaggtcaggagttcaagaccagcctgactaacatggtgaagccctgtctctactaaaaatacaaaaattagccaggcggtggtgggtgcctgtaaccccagctactcgggaggctgaggcaagagtattgcctgaacccccagaggtggaggctgcagtaagctgagatcacagcgctgcactccagcctgggcgacagagcgagactctgtctcaaaaaataatgataataataaagtgtacaatttcgtggcattcagcacattcataatgttgtgcaaccatcacctctatctagctctcaaatgtttgattcccccaaaaatttgtacccattagcaaccactccccatttgtcctccttcagcttccatctttatggatttgcctgttctgggcatttcatatcaatgcaattcacactatgtggccttttgggtctggcttctcttactcagcatcacgtactcaaggctcatccctactgcagtgtggaccagtgcttgcttcctttttatggctgagtaatattccatcatatggatggaacacattgtttatccacccatctttgatgcacatttgggtctattccaccttgtgaatacaggtaccattttagtttatttacttatttatttatttattgagatggagtcttgctctgttgcccaggctggagtgcaatagtgcaatctcagctcactgcaacctccaccttctgggttcaagcgattctcctgcctcagcctcccgagtagctgggattacaggtgcgcgccaccacacccggctaatttttgtatttttagtagcgaccaggtttcaccatgttgcccaggctggtctcaaactcctgtcctcaagcgatccgcctgcctcagcctcccaaagtcctgggattaaaggcatgaaccaccgcacctggccctggatgttattttataacctcacgagcttaacttacattccctactttttttatgatctgatcaaaaaatgctccactctgctttaggcctgggccccaggcaggactttctagtcaacagcaaaaacgcagcttggtagcctggcccctgagcctcagtttttccatctgtacaatgggctaaagtctatgctcttttagggatgtggggagtgaggatttagagaagtgactcatactgaagcaactggtacataggaatcactggactaagccagctttctttttttttttttgaaacagagtctcgctctgtctcctaggctggagtgcagtggcacaatctcggctcactgcaacctccgccttctgggttcaagccattctcctgcctcagccttccaagtagctgggactacaggcatgtgccaccacgcccagctaatttttgtatttttagtagagacgggttttcaccatgttgaccaggctggtcttgaacgcctgacctcaagtgatccgcccacctcagcctcccagagtggtgggattacaggcataagtcaccaggcctggtctaagccagctttcttgccacctttgttactggtttttttgtttgggtttctttttttttctttttttgagacagggttttgctatgttgcccaggctggtctcaaactcctgggctcaagtgatcctcccagctgggcctctgaaagtgctgggattacaggcatgagccaccgcacccggcttaccattcttttgtcttgcctcccaggtctacagcagctctgagttcctggccgtccagcccactcctaccttcgctgaaaggagcttcagtgaagaccgggaggaggggtgggagcgcagcgaagtggactatggccgccggctgagtgctgacatccggtaagtggcctggggaagtgtaggcagatccagcttccaagcctgctgggaggtagagacacaaaatctgatgcaaagggagcttcctagtggccaagtagaaaagggtcaaacatattgaccagcctatcaggtccctggcaaccttgctccctttggctctgtgttcctcaccatgcaaacataaaacagctgtgtaccatcatgctgctaggcacacttttccttctgtccagaatgccctttgcttactaactcctgttcatccttcaaagctcagacccaacagaaacagtcaatgtctgctagaggatgggtgttggaagctggccttttttttttttttttttttttgagacggagtctcgctctgtcgcacaggctggagtgcagtggcgcaatctcggctcactgcaagctccgcctcccgggttcacgccattctcctgcctcagcctcccgagtagctgggactacaggcacctgccaccacacccggctaatttttatatttttagtagagacggggttttgccatgttagccaggatggtctcggtctcctgacctcgtgatccgccctcctcaacctcccaaagtgctaggattacaggcgtgagccaatgtgcccggccttttttttttttctttttttaagagactggttctcactctgtctcccagactggagtgcagtggcacgatcatagctcacttcagcctcagactcctgggctcaagagatcctctcaagtagctgggactacaggcgtgcaccacggcacccggctaattttttaagcaattttttgtaggccaggtgcagtgacttacacctgtaatcccaacactttgggaagccgaggcaggtggattacctgaggtcaggagttcaagaccagcctggtcaacatggcaaaaccccatctctactaaaactccaaaaatttagccgggcatagtggtgcacgcctgtaatcccagctacttgggaggcttaggcacgagaattgcttgaccctgggaggcggaggttacagtgagccaagatcgtgccactgcactccggccggggtgacagagcgagactctgtctcaaaaaaaaaaaacaaaacaaaaaacaaaaaattgcagagatggggtctccttatgttgcccgccctggtctcgaactcctggcctcaaacaatcctcctgtctcagcctcccaaagtgctggaattataggtgtcagccactgcacccagcctggaagctgggttttaaaagttgaataggaagccgggtgcagtggctcacgcctgtaatcccagcactttgggaccccaaggcaggcaggtcacttgagctcaggaattcaagaccagtctggccaacatggtgtaaccccgtctctactaaaaatacaaaaattagcccagtgtggcggcaggcacccataatcccagctacttgggaggctgaggcaggagactcacttgagccctggaggcagtggttgtagtgagctgagattgcaccactgcacttcagcctgggtgacagagtgagaccctgtctttaaaaaaaaaggtgaataagcggtctccaggtggacagagaggacagtgcagacagaaggaactcgtcctgtctatgcaaattacccttgactgcagactgagagttaagatgtggccatgaaggtggctgagtatcctggggtgcaggtgcctggcaggggtgatgcaggctcttcctccctgcaggctgaggtcctggacatcctctggatcctcctgtcagtcatcttcgtcccagcccgagcggggtcccagcccatctctcctgaataccatcagcctggacacaatgcccaagtttgccttctcatcagaggatgagggggtaggcccaggccctgcaggccccaagaggcccgtcttcattctaggggagcctgaccccccaccagcggccaccccagtgatgcccaagccctcgagcctttctggtaagtggggccctgagtaagagggatgatgtcatggaagtttcccagaggaggggctatttgagatgggttttcaaggatgagtaggagttctccagagccaacaaaggctttaagagaggagaagccagggtcccagagagacccccagcccccaaggaaccccagtctagggtaaatgcccccagcttcatagagtcaggatgggacccctagctcccaagatgggggaactaagggtctaaatgggtgtggaggaaggcttcctggaggaggggacttgaagacttttgcatagagaataatttgggaagggagtgcaggaagagggaactgcatgagcaaaggccaggaggctggactgtgtaaatagtgaccagggaggaagggccttaaggtccctttaggaccacatggtgagtttgaggggcacccagctgaccctgctgaccctctagccgacacagctgctctcagccacgcccgcctacggagcaatagcatcggcgcccgacactccacaccaaggcctctggatgccggccggggccgccgccttgggggcccaagagacccagcccctgagaagtccagagcctcctccagcggtggcagtggtggcggcagtgggggccgcgtgcccaagtcagcctctgtctctgccctgtccctcatcatcacggcaggtaatgcccaaggcccctctcacctttgtctgtctgcacccattttcaccaacagggtgggggcccttcctgagttggggaggctggggatgagccccagaagaggggaggaggagtaggacacatggagagctggggagatggtgttcccagtagagggcactgcacgtgcaaaggcctggtggggtgaccatgcttgggacattgaagcaacagcaaagtggccagggtggtcgttgtggtgggaaagagggggccccaggggagacctgtgagggagtgagtgaccccctccctaaccccctgcagatgatggcagcggcggccccctcatgagccccctttccccgcgctctctgtcctcgaacccgtcgtcccgtgactcttcgccgagccgagacccgtcccccgtgtgtggcagcctgcggccccccatcgttatccacagctctggcaagaagtacggcttcagcctgcgggcgatccgcgtctacatgggtgatagcgacgtctacactgtgcaccacgtcgtctgggtgagtgccgagtgggaatggcagggacccgggttctagtttgactctgcccggtcatgtcccttctcagagctgcattttggagcctggcagggttaggtagatagagctggtgccaccgagttcatctcggtccctgtcatttggcagggaggaggtcagatgagagagacaaggatggatggatggaagctcacagatcccaagtggcattaacctcccagctccatatggggacgcactgggcatgttatcctccctctcccagcccaagggcgtcgaggcatgccctccctattggttgctccctgaacagacacagaaggctttctggagaagggggcgtaggagctggggctttgatgggtgagtaggagttcccccaggatcagggaaactgagacagcacaagaggcagcagcttgctggggtcccacagcagacccagcctgggctggggtccccagatgtggggcccaggccattgaccccaccgttctcgtctgcccccagagtgtggaggacggaagccccgcccaggaggcgggcctgcgggctggggacctcatcacccacatcaacggggagtcagtgctggggctggtgcacatggacgtcgtggagctgctgctgaaggtgcggcacccccactgcccaccctcagggctccccagcaccccttggccgcagctcccggttccccgtggttctccgcgtccagacacacaaccccacattcaatgtcaactccaggcctggcacatccacttccttcggcccagaatacatgtccttcttcagcccccaacatcaccccttagagctgctcctccaggaagccctcccttctccctgggcaccctcacatctgttcctccctctggcctgaggcctggaggtaggagatgggctcaagacaggaggaagggccgggcgcggtggcacacgcctgtaatcccagcactttgggaggccgaggcaggatgatcacctgagctcaggactttgagaccagcctgggcaacagagcgagacccccatctctgcaaaaaattaaaaaataaaattagctaggcatggtggcatgcgcctatagtcctaggtacttaggagtctgaggtgagaggatcgcttgggccgaggaggttgaggccatagtgagctgtgatcgtgccatactgcactccagcctgggacacagagtgagaccctccctggttctaaaaaaatagagggctctcatgtgggcagctgcatgggtggttcattgaatagctggacactgggtaggtgtctttggcctaatgactcatgggccattaggtgagtgattgggggatggggagatgttggggtgattaatgggtggataccagataggtgggtgacagaccccgggagggtggagagtgaagagggcaggcctcgatcggcgttgaccgcagagggaaggatcttagcaggaggggtggtgctccctgggctattgtttgaccggatatattgggtaggtcactggttgtgtggatgaatggatgctggggtggtgggtcccagctggtgcccggagtgaaggggacatagcagctgcctggcaagtgctgggccctgtgagaggcacagaggcaacccctcaccatccctcccgcagagcggcaacaagatatccctgcggaccacagccctggagaacacctccatcaaggtgggccccgcccggaagaatgtggccaagggccgcatggcacgcaggagcaagaggagccgtcggcgggagacccaggatcggtgcgcggcagtgaccaccagggagcggtacacagggggcggggccacggggactggggttctttttttcttttctttttccttttttttttttttttttttttgagacagagtcttgctctgttgcccaggctggagtgcagtggctcaatctcggctcactgcaacctccacctcccgggttcaagcgactgtcctgcctcagccccctaagtaactgggactacggcgtgcaccatcatgcccagctaatttttatattttcagtagagacagggtttcgccatgttggccaggctggtctcgaactcctgaccttaaatgatccatctgcctcggcctctgaaagtgctgggattacaggtgtgagccaccatgcctggccaggagcaggggttctgaagcctccggttttcttaccccaggcggaagtcacttttcaagaagatctccaagcagacctccgtgctgcacaccagccgcagcttctcctccggactccaccactcactgtcatccagtgagagcctccccggctcgcccacccacagcctctcccccagccccaccactccctgccgaagcccagcccctgatgtcccagcaggtgggtgcaccccgaccccccaccaccccggctaccctgggagcaagggctggtgggccccaggagggaggaaggagttcaggggatggaatgacacgatgtagggaaaaagatgaccgggatcctggtgtctagcagggaacctgggagtacttagagacgaatgcaggtgccagggaaggatgcacccagcagaggaaacatcatggacaaatggggctagacaggagggtgggaaaactgagaagaggccaggcacggaggctcacgcctgtaatcccaacactttgggagcccgaggcaggaggatcactgagcccaggagtttgagaccagcctgggcaacacagggagaccccatctgtacaaaacataaaaaaattaggtgggtgtgaggccgggcatggaggctcacacctgtaatcccagcactttgggaggccgaggcaggtggatcacctgaggtcgggagttcaagaccagcctggccaacatggagaaaccccgtctgtactaaaaatacaaaatcagccaggtgtggtggcacatgcctgtagtcccagctactagggaggctgaggcaggagaatcgcttgaacccaggaggtggaggttgcggtgagccgagattgagccattgcactccagcctgggcaacaagagcaaaactccatctcaaaaaaaaaaattaggtggttgtggtggtgcacacatgtggtcccagctactctggaggctgagatgggaggctcacttgagcccaggaggtcaaggctgcagtgagccatgattgcaccactgcactccagcctaggcaacagagtgagaccccatctcaaaaaacaaaagggaaaaaaaaaaagaaaacagaagtgatacagagaaggctttctggaggagggggagtaggagctggggctttgatgggtgagtgggagttcaccagagctaggccaaggaaacaaccctgagcaggaggcagaaaagtctggcatgaaccaggcatgatggctcatgcctgtaatcccagcactttgggaggccaaagcaggcggatcacttgaggtcaggagtttgagaccagcctggccaacatggtgaaaccccaactctactaaaaatacaaaaattagccagatgtggtggcacatgcctgtagtcccagttacttagggggccgaggcacgagaatcatttcaacctgggaggtgaaggttgcagtgagccaagatcatgccactgcactccagcctgggtgacagagcgagactctattgaaaaaaaaaaaattagccagccatggtgacgtgcacctgttgtcccagctactcaggaggctgagttgtgaggatcacttcagcccaggaggttgaggctatgattgagccagtgcactacagtctgggcaacagagcaagaccctgtctcaaaaacaaaaacaaccaggcatgatgggtggccacatggaaggatgtgggctttagcagtttttgtcagtcccacagctccacttctgggctggggacattgaggccagcagccctgacctacgcttatcacccacagataccactgcatccccacccagcgcatccccgagctccagcagccccgcctccccagctgctgctggccacacccgccccagctccctgcacggcctggctgccaagcttgggccaccccgccccaagactggccgccgcaagtccaccagcagcatcccgccctccccgctggcctgcccgcccatctccgcgcccccaccccgctcgccctcgcccctgcccgggcacccgcccgcacctgcccgatccccgcggctgcgccggggccagtcagctgacaagctgggcacaggggagcggctggatggggaggcggggcggcgcactcgtgggccagaggccgagctcgtggtcatgcggcggctgcacctgtccgagcgccgagactccttcaagaagcaggaggccgtgcaggaggttagcttcgatgagccgcaggaggaggccactgggctgcccacctcagtgccacagatcgccgtggagggcgaggaagccgtgccagtagctctcgggcccaccggaagagactgatcccctgccaggtctctccctggcatcaaagttacgcgttttcttgtgcaatgttttttccgtaaagtcatgcctggatggggactgagccaccagcctgacacccagaaggcgagaagccatctcggtccttgctggaaggtggagacatcgcttgtgttctggtgtcaatcggggctggatggggcaagaatgggggacaagggtggctttgtaaatagcagcaaatccctgcaactaatttattactttttttttctttttttttttttttttttgagacagagtctcactctgttgcccgggctggagtgcagcggcgtgatctcagctcactgcaacctccgcctcccaagttcaagcgattgtcctgcctcagcttcccaagtggctgggattacaggcgcccaccactatgcccagctaattttttgtatttttagtacagacggggtttcaccatgttggtcaggctggtctcgaactcctgacctcatgatttgcctgcctttgcctcccaaagtgctgggattacaggcgtgagccactgggcccagcctaatttattactttttataagcgatagccgtactgagccgccccctgaaggcggctgccaggtcttgccccaggcacctgggactctgtttgcaggccctgccctctgggctgagaaggatgcactttggacaagtcatctgtgtttgtgttttccagtttttctgtactttttaagtgttttgtgttacctggtctcattcccctccccacacctacccatttgaggggatggagttgaagtcacctggtcacctgtaccggcccagttcggctacaacctggagtgtccgtaaacaattcctctcacccacaaaacaatgtaatcccagcgatggactggattctgaaggccacttcccaccatcatagctgccatgcccaggcagtgcctgctctatatatagagtctgcctccaatcctgctggcttcagcctggagaagggatatgggagctggagctttgatggatgaataggtgttcaccggatctgggcagaggggtcatccgctccccaggtgggcactgataaaggaaggtacaggcctcacctggaactgccaaggcagcctccagaaatgctcggctgtctcggggcacgctccagtatgccagtcctgcgggattacgtccagctacttccagaaacactcagtgtcccctcccctcaggctctgccttggcctggccttgtccagtctaccctggacaagatgccgtgtgtttgaggcccagcagagtaagcccttggccgtgatgtgtctgaaacacctgttaggggttccctccatatgtcagagcctctctgggatgaagttcaagccagaaaacccagtcgaggctcaagtttgaatttcagcttcactgtgtggctctgggaaaatggctttcccactctgtgcctcagtttccttgtgtttacaagactaatcccattgactgtttattaagcacctactgtgtgccaagcgcttttacgtggcttctccctcagccagccttgagaaggctggaggtggtgtcatcacctccattttacagacaaagcagctgagaccccagcgaggggcggagacctgtcccacgatcacccagcaggagtcgtggcagaacggagcatcagccagaccctgttgtgggcgttgtcatcaagggagcttgaatggagggtctggtgtcagatacagccgactccagccccagctcatcccccatgatgctgtgtgacccactgggcactctggtgagggagctttccagacatcaacagcccactctgcttccctttctgagtcccctgtccagcactgcctagtgttggagggtagaccaaggctgtgcatgattcaccccctccttccatcctggagctggcagtgaataaaagcccgtatttacaaagatgagctccaacgtctggatttgtgaggggctgagaaaggaggaagggaagagtggggaggggagcggagtgaaatagacccatggctcaaagtcattgcaagtgggttttgaggactgcatagcagttcgctgttgagattcttcctgatgccatcgctggtaccagcctcctgctaccctctccctgcgagtactccatcatagccctgcctttaaaagcttcctccagacatctgggccctgagctatgttttttatttttatgtttttgagacaaggtctcgctctgtaacccaggttggagtacagtggcgcaatcacggcacattgcagcctcgacctcctgggcgccctgggctatgttaataaaataaataagcggcggggcgcggtggctcacgcctgtaatcccagcactttggaaggccaaggcgggcggatctcctgaggtcgggagttccaaaccaccctgaccaacatggagaaaccccgtctctactaaaaatacaaaattagccgggcgtggtggcgcatgcctgtaatcccagctgctcgggaggctgaggcaggagaatcgcttgaactcgggaggtggaggttgcggcgagccgagatagcgccattgcactccagcctgggcaacaagagcgaaactccgtctcaaaaaataataacaaaataagcaatcgtcgcgtcctttctatcctggtcttagcttgcgctctgccataaaactccctctagccgaacccggcccagccctagagcaatccgttacttccggggcgctcagccggcatgcaaacactcttggctacagccccatctccgagtgcgttcggctatttccggaaaccgtcggcatctaggctcaagtccgctaaattctagtgcccgtaggggtcgagatcgttggctgtttccggacgctctgggttgccatggaaactccttcaaccctggctttctccgacttctgctttttgcggcaggccctttccccactctactgccccctgtttgctgagcttgagaacgcctcatttgtcccctggaaccatctatgcttcagtaattcccataagctggcggtcgcctctgggtctaaactcccaaggcctccattgggcactgagcacattcggttatttccagaaacgctccgcggtcttggggatcagcctcagttgtgccagtgcggccgtagagagtgttcggccatttccgaaagcgctcgggcgtctctaagcccagccgagcccagtctcggatccctcgccgacccgattgcactcggctacctctggaaacgctcggctgtctcgggggcaccctctagtccaccagtcccgcgggattacgttcggctacttccggaaacactcgggtgcccccttacctcaggctccgcctcggcctcggttcatccgcccggctcgaatgcgctcgggcatttccgccgggggcgggccaggccgctcggaaccgtggcggcggcggaggcggggatcccgcggctgcggcgacggtggccgcggtggagccacggggcgggcttggcttggtgtgacggcggctgcggcggcggtggcggccgcgaccaggtgagtcctgactggccctcgtggcgggggcggctgggagtgtgcttaaatgcggggcgcccgggggcagtgccgggccccggtggaagccagaacgcaagcgccaggctgcgtcgggccccgcgggaactgggggggccgcaggcaagggggggcctcgggctcggctccgcagcggtgcagcctccttgggacggtcggggcagaatggggagagactccccgcgtccaagataccggactggagccgaggccccaaatgaagggaggccctgcctggaatggggcttcgaatagtaccgaggggcgcccaggcattgtgcggggcagaatggggtgcgggagggccgggggtcgaacccacttccggtcccctagccgggtggccgggtccacgcagacccaagtgcgcgtctgtgtgagcgctcaggccctgccttcacccgcggagcccccagccctgcctgccccgcccctcccgcctcccggattcggggagcgctgctcccggggcgcgcacaccggggcgtgggggcgggctggcaggcagatccaggcggttttctgggcatcccctctcggggcctcagtttccccacctgtagaatgagggtaacagaggcctaggaatgggtaaattgggcacccgagaatgtggcgcccctccgccctgctcggacacctcttggggttccccgtgactgaaggatgctcagagcctccacctgacactcgggcctcttggtggatagcacctatccttatagccaccctgaatccttgacaagcaacttaacccactgccaaggctttgcatgtgccgttccgtctgcctgtcgcgccttcctatccgctgtgatgatccattctctagaacagcacgtccatcccccgaccctagccctgtccatcacagggcgtctgaacccgcagggctaggctgggaatgtgtgcctatctccgcctccccaggctgggactcctggggaataatcaatgccctgctgccggcagcctcccctcctcctcagctgcagtacccccaccttctcctggctccctgtccctgcctggggctaaggttccttctaagcacctccccatctgcattttgtgcctactctgggccccaggctggagctacctgccagcccactcactcctcctctgcagagactggaggtccatttgcttggactcacctcgaggcctttgcttgtgtagaggcctcttcctggactttgttccctacctcttagttcagctggcctgacccctctatggagctcccaaagcacccggagtggcctccattgcgtcctccctgccctaggtatctggccacctggctgctgccccctcatgtccaactgggccaagtcggcagatctaggtgtaagtcctggcttcctcctggcctactgcacggccctagatacctccctgctctgagcctcagtttccccatctgtaacaggggtgatgaaaagcctgtttactggccgggcgcggtggctcacacctgtaatcccaacactttggaaggcagaggcaggaggactgcttcagcccaggagtttgcgaccaacctgggcaacatagcaagaccccacctctattggaaaaaaaaaaaaaaaggctgggcaaggtggctcatgcctgtaatcccagcactttgggaggccaaggcgagcagatcacttgaggtcaggagttcaagaccagcctggccaacatggtgaaacctcgtctctactaaaaatacaaaaattagctgggtgtggtggcctgctactcgggaggctgaggcaggagaattgcttgaacctgggagacaggttgcagtgagctgagatcacaccactgcactccagcctgggtgacagagcaagactctatctcaaaaaaaaaaaaaaaaaaaactgatttactgagcatgtagtatacctggggcaggttcttgggaactctactcccagcagctccaagggaaggctgtcagtatacccattttacagatagagaagctgaggccctgagagggaccggccccaaggtcacccagtgattcagggaattccaaatcaggatttgggcccatctccgtgttgggggtgagaggagttggcctggctaacgctgccctatccctgtctccctaggtcggcgtcctcagctggccgagcatggtggcagcctgcacccttggctcccttgtctggtgcagccagcagagccgccagccttgggcgcccatggccctccgtgtgagggcgtgagcggcctgccccagcctcacctgctgatggaggactcaatggcccagtgacctgacaccacaccaccaactccctcccaccagctgacgaatggtggacccagtgacgagtggcccttgtaagggtcatggaataatttgaagcgaggcatgagcggcccctgtggtcgcctgtgactgctggagatagaggtcccagcaccccaagccaacccagcggaccctcccagccctgcttcaaccaatggggccagtggggctccaagcagccacctaaccatccagaccccaccccactcacgcggccatggcgggccctgagggcttccagtaccgcgctctgtacccgttccgccgggagcggccggaggacctggagctgctgcccggcgacgtgctggtagtgagccgggcggccttgcaggcgctgggcgtggccgagggtggcgagcgctgcccacagagcgtgggctggatgcccggcctcaacgagcgcacacggcagcgaggtgacttccctggcacctatgtggagttcctggggcccgtggccctggcccggcccggccctcgcccacggggcccccgcccactgcccgccaggccccgtgatggggcccctgagccaggtgagcagcaagcaggggccctggaaaggggggtggtcccctcagacccttggtctcctcttctgtccagtgaggcaatgggatctccaaggaaggaggaaaaaggacatttggtcatttgacaagtgtcttcagtgctaggctcagcagtggacacaaggcctgttcctgccctcatgagcttctggttcaagaagggatgagagtgggttcaggaggtgacacatgccatgaggaagggggcttgcgtgggaagatgcgagggtggaagctcaaggcagtgggggcagcgagggcagaggctgtggagtagaactctaatggcgggaacggccagcaggaggaccagagggaggaaggggagggcaatgtgcgctggcatggaggacttagtgggattgattttgaggacaatggagagtgttcagtaggattcagaggctcagcctagcttcatcctgccttttgcagacagggtcccttgaagaacccctttggagaccctgatttccaaaatgaagccacaaggagggtaggatgtgggctgctcagctgaggccacacagcacagtgggatatgaggaccccacatccctcttcaaagacccttggccatcaccacttgccaggggtgtgccaggtgtagagaatcgggggcaccgagcccactcagtgactgctgtttgatgggcagggagtgtgggctctggccggggaaactgtggcccaggttgcaaggaggaggctaagaggtgctgcatgctcggcatggtctgctccgaccctcccagcagcccagcaaaaggccctgtgtgcagaccgggaggcctgagtgcaaggccgtcaaatgccgtacttgaaaccagttggtcacccagggaggccaaagccccgggaggtgccaggcctgctttgtgccagggtgacattgcccaaaggcaaaccagagtcccccagcgcagggcggaatagggggtgctgaggtggtgcgacgctggccccagcctccaggcatctggtatctccagggcccaggcctgcgtcctgcctcggcctgaaggagcaggaggtggccccgtctgggctcccagccagaatctgcctctccccctggtaacagccacctccctcctctgcctggcctctgtccagccaccatacacggccccacgtggggcggctgcccagccccaccctctgaatcttccagggttatgtgacctcggccagaacccgccccctcgaggcctcagtttcctcatctggaaacaacagggttggtccctggggatgctgggacccaacccctcggaaatgtgctgaagtcacctgagccccacctggctgtgcacccacgggggaggttgcagcccctctgacccacaattcctcacctgcaaagtcggggtgatgcagttctgatgggaaccccctccccattctgcagattgatcccaggccactctcagggttgagtttcccaacccaccggccagagtgtcacccacctccacctcctccttgtccttttcctttttttttttttttttggcgttttcgttgcagctgggcctttctccagcttgaggcgccacctggcccatcactcagggaggccccgcaggccccggcttgcccctgctgtgtgccagggcgtccccgccgagggccagagcagcgtccaatggtggcagacagcgagctgctgaggcggggatgctgcacacaaaaggccctgtagtgctgggaagccagggctgggagggggctgggcccaggatgccgccggcacccgctaggaggggtttcagcttttccaaaaggggagcaataattttctttcttttctaaattttaatttggggaagaaataattttttagaagcaaaatgattaagaaaacgggtcatggtccttggaaggaagctgttctgacccaggccgggatatttttcttttctttcctttcaaccacttttttgtttgcatcaagaagggagaagcgggccgggcacagtggttcatgcctgtaatcccagcactttgggaggccaaggcgggtggatcacttgaggtcaggagttcaagaccagcctggccaacagggtaaaaccccatctctactaaaataatacaaaaattagccaggcatggtggcacccacctataattccagctacttaggaggctaagtcacgagaatcgcttgaacccgggagatggaggttgcagtgatccaagatcatgccactgcacaccagcctgggtgacagagcaagactccatctcaaaaaaacaacaacaacaacaacaacaaaaaacgaggaggccaaggcaagtggatcgttaggggccaggagtttgaggctgcagtgagctaggattgcgccactgcactccaacctgggtgacaaagcaagaacctgtctcaaaaaaaatgagaggcaatgtcattggcccatttttcatttgaaggaactgaggcccagagagggcaggtcctgtggccaagattgcacagcaggttgtggcagagcccaaacctgctatatgactttcagtggctgccgcaaaaattaccaccaactaggtggcttcaaacaatggaaatgttatttattaattaatgtatctttttgttttgttttgttttgttttgagatggagtttcgctcttgtcgcccaggctggagtgcaatggcgcaatcttggctcctgcaacctctgcctctcgggttcaagcgattctcctgcctcagcctcccgagtagctgggattacaggcacgtgccaccacgcctggctaatttttgtatttctagtagagacagggttttaccatgttggtcaggctggtctcaaactcctgaccacaagtgatatgctcacctcggcctcccaaagtgctgggattataggagtgagccactgcgcctggcctcctttttttttttttttttttaaattatttaagagatggggtctcactctgttgcccaggctggtcttgaactcctggactcaaaggatcctcctgccttggcctcccaaagtgttgagattacagacgtgagcctttgcaccccaccacaacagaaacttattctgtcatgtttctggaggctggaagtccaaaatcagggtcgtgccccctctgaagtttccttccttgcagcttctggtgcctccaggcattcattcctctcatgcatgggttgattattccagtctctgccttggctttctcttcttttttttgagacagagtctcactctgtcacccagactggagtgctatggcatgatctcagctcactgcaacctccgcctcctgggttcaagcaattcctgcctcagcctcctgagtagttgggattacaggtgcgcaccaccacacctggctcattttttttttgtatttttagtagagatggggtttcaccatgttggccaggctggtcttgaactcttaacctcaagtgacctgctggtctcagcctcccaaagtactaggattacaggcatgagccaccgcacccggcctgttgacttatttttgaaacggagtcttgctctgtcgcccaggctggagtgcagtggtgcaatcttggctcactgcaacctccgcctcccgggttcaagcgattctcctgcctcaacctcccgagtagctgggattacaggcacccaccaccacgcccagctaatttttctgattttagtagagacaggttcgccatgttggtcaggctggttcgaattcctggcctcaggtgatccacccacctcggtctcccaaagtgctgggattccaggcttgagccgccatcctggccggctttctcttgttacaaggacatcagccagtgggtttagtgtccaccctaatgccaggctggtctcatgtacagattcttgctttccttacacctgcaaagacctatttccaaataaggtcacaggtaccagggatgaggacttggacatatctttttggggactttattcagcgcactccacctagtctgtgaagttgtgtgaactcctcatattctaacccagaaaattgtgtcccatcaattctgccctttcccagcccctccacccaaggtcttgcagcctcctgcggatgggagtcaaggtgccaagcacttgcctgagctgggccctgcctcaaactgccccagctgaggttcagccagcaaagagaggggctgggctccttccaggaaccccaccaacatgcaacccccctgtttcccccaccaggcctcacactccccgacttgcccgagcagttctccccacctgatgtggctccccctcttctggtgaagcttgtggaggccattgaaaggacaggtaagttccagcctggctgcagcccctggattctgcttgcttacctctagtgacaggcgactcatcctctcacagggcctccaagctcatgctgcacggaaacaggctgagcctggatgccctgggcctctatgttgaatagggcacagagtgactcctaagggaagatgggaaggtgaacatgaccaggccactgcatgtgctgtgccctctcccagttctccctccccacccctcccatgcccttatctctgggcagcaaagggagactgcaggggggttgagcggccagtccaggcctcacgaggtcggggcagcatttgagagctgactcgcctgtccccttcacccccagggctggacagcgaatctcactaccgcccggagctgcccgcaccgcgtacaggtgaaggggagcctcaatggggttgggaggaggctgggggccccagtacacatgagttggacgtgtgcccccctgcacccgcagactggtccctgagcgacgtggatcagtgggacacggcagccctggctgacggcattaagagcttcctgctggcactgcccgcgccgctcgtgacccccgaggcctcggccgaggcgcgccgggccctgcggggtgagcctggcgggtagcccgggggaaggagggggctgtagcgggtgggagggcccaggcctggctcaccctgccctggccatctgtccgcagaggccgcggggcccgtggggccggcgctggagccaccgacgctgccgctgcaccgcgcgctcacgctgcgcttcctgctccagcacctgggccgcgtggccagccgcgccccggccctgggtcccgcggtccgggccctgggcgccacctttgggccgctgctgctgcgcgcgccgccgccgccgtcctcgccgccgccagggggcgctcccgacgggtgaggggcggggcggagccggagcgagcaggggtggagtttggggtggggcgggcggggcatggccagagtgagcggcgtctagaccctaagaagggaggggatggggtccagagtgagaagctgcgttcttgtgatgacggagcggagacctgggctcctgagtcgtgggacagaaggtgaaggggcctagtcccgaagcatgtgggtggtgcctgcaccttcccttctgctcgtcgcagctccggtactggtctctcgctcgcctttgtgtgagaatctatggagcacttactgcatacagctatgagggagctggcctcgcacatgtgcctgtatcatctcctcctccgccctgcacatactgtctcgtatatacccccaggcgtgcaagcgcacgcacaatcctgtgcacatgcgtgggcggacaggccctacccagccctcaccacactccccttccccctaaggagtgagcccagccctgacttcccggcgctgctggtggagaagctgcttcaggaacacttggaagagcaggaggttgcgcccccaggtgagtcccctgtattgctgtcatttcttcccgttgggggccgtaaatactgatccctgagtgctgccggcatcagcaggctggttgcagtgggaggcagccacagtatacagtcggtgctcaggatgcatttgttttcctgtcccccagcgctgccgcctaaaccccccaaggcaaagccggcctccacagtcctggccaatggagggagcccaccctccctgcaggatgctgagtggtactggggggacatttcaaggtaggttgctggcagggggccagggaccaaggaggtgtcacagggtgagcggggtctccaggtggctcggcagtcccaatgttggatgttcccacagggaggaggtgaacgagaaactccgggacactcccgatggcaccttcctagtccgagatgcttctagcaagatccagggcgagtacacgctgaccctcaggtgggggcctgtccctgcaaggataaccgggggtcacaggtcacagagaccgggagttcagaggggatagaacatgtgcggtttcaagaatggagggccaggcacggtggcttacacctgtaatcccagcactttgggaggctgaggctggcagaacacctgaggtcaggagtttaaaaccagcctggccaacatggtgaaaccccgtctctactaaaaaattaaaaaaaaaaattagccaggcatggtgatggatgcctgtaatcccaactactcgggaggctgaggcaggagaattgcttgaacccgggaggtggaggttgcagtgagccgaaatcgcaccactgcactgcagcctggacaacagagcagcaagactctgtctcaaaaaaaaaggggacagggattgagggtcaggtgcggggtcccactgggtgccgacacccctctcctcccccaggaaaggcgggaacaataagctgatcaaggtcttccaccgagatgggcactatggcttctcagagccactcaccttctgctccgttgtggacctcatcaatcactaccgccacgagtctctggcccagtacaatgccaagctggacacacggctcctctaccctgtgtccaaataccagcaggtccgtgctggcctgggagccagggagggtagcacctggctggccccaggcctcagtttcctaggtagacccgaccaggctatgcatctcccctcattccgccacgtatctccaggaccagattgtcaaggaggacagcgtggaggcagtgggcgcccagcttaaggtctatcaccagcagtaccaggacaagagccgcgagtatgaccagctttatgaagagtacacacggacctcccaggtactccaggccccgtacatgagggaaaccgagacatagaggggcagtggcaaggccgggagcaggatgaccaaccccagaggacttgaggatgaatatccagttgcaggtcacagagcaggcacttagcaccaagggctgttctaaaaacatagaaataaggccaggcacagtggctcccgtctgtgtacttgggaggcagagacaggaggatcacttgagcccaacagttcaagatccttctaggcaacatagggagacccgtctacaaaaaaatttaaaaattaactgggtgtcgtggtgcatgcttctactcccagctactcaggaggctgaggtgggaggatcccttgagcctgggagtttgaggctgcattgaattgtgatcatgctgctgcactccagcctgggtgacagggcacgaccttgtctctaaaaacagaaataagcgtacgaggctgggtggggtggctcacgcctgtaatcccagcactttgggaggccgagatgggtggatcacctgaggtcaggagttcgagaccaacttggccaacatgttgaaaccctgtctctactaaaaatacaaaaattagctgggcatggtggcggacgcctgtaatcccagctactcagaggctgaggcaggagaatcgcttgagcctgggaggcagagattgcaatgagccaagatcgtgctactacactccagcctgggtgacaagagtaaaactccatctaaaaaaataataataattaaaataaaaaaataagtgtacaagcttttacaaaaccaaaaaaggacagatgagaagggcccaaccagcctcacaggagtggctgagccaggacctggggagtgtccaggatgagcctatctccggctggccctcagttttcccatctgcagaatggaaccaggcaccttgattacttatgtccccttcaaccaagatgttattcaaaatgaaatcatgccaggtgcagggcgcgcacctctaatcccagctactcggaaggctgaggcgggaggatcgcttgagcccaggagttcaagactagcctgggtaacatagcaagactttgtctcttaaaaaaataaaataaaaattaagtgaaaggttttgtcactcaaggactgtgctaataagcttcttttgcaagttaagagggaatagattcaggtggaacagctgggaattcctcagtcgtccctagtaccctaagggttttctgtcctcttttttttgttttgtttttttttttttgagacagtgtcttgctctgtcatccaggctagagtgctgtggcatgatctcagctcactgcaacctccgcctccctggttcaagcgattctcctgcctcagcctcccaagtaactgggactacaggcacgtgccaccatgcctggctaatttttgtatttttagtagagatggggttttgctgtgttggccaggctggtctcgaactcctggcctcaagtgatctggctgcctcggcctcccaaagttaaaaaaaaaaaaagaaaaaaaaaatttaataaaattaaaaggtaggccgggcacagtgactcatgccagtaatcccagcactttgggaggccgaggcaggcagatcatctgaggtcaggagtttgagaccagcctggccaacatggtgaaaccccatctctaccaaaaagataaaaaaattagccgagccaggcacaatggctcaagcctgtaatcccagcactttgggaggctgaggcaggtggatcacgaggtaaggagttcaagaccagtctggccaacatggtgaatccctgtctctactaaaaatacaaaaaattaggcgtcatggcatgcacctgtaatcgcagctactcaagaggctgaggcaggagaatagcttgaacctgagaggtggaggttgcagtgagccgagatcacaccattgcactccatcctgggacagagtgagactccgtctcaaaaaaaaaaaaaaaaaaaaaattagccgggcatggtggctcacacctgtaataccagctacttggaaggctgaggcaggagaatcacttgaacccaagaggcagaggttgcagtgagccaagatcacgccactgctccagcctgggcgacaagagcaagactccatctcaaacaaaaaaaattttgaggtgctgtctcaccatgttgcccaggctggcctcagactcctcagggttcaagagatcctcccactttagcctccctactagctgggattacaggcattcgccaccacccctggcctctgtcccctttttactgatgtgttagctgaggctctaaatggacaagacagttgtccaggatcagttaggagcactgtaacctcagaattgactttggccctgagcctcagtttctctgttaatagttgttactttgttaggggttgttggaagggtccatgggacaaagtaaggaaagtcgtagtgcggcatctcccccaagaagccctgtgagctgtagcaactagatctgtcattcattcttagcagtgttaacaggtccaggtgtttgtggatacctataggaggatgtaaagaagaagagggtttggggggtggggttttgaaggctgaataggagttcatttggtgcagcaggcgttagaagaatgacactctgatagagggaccagcttgagcagtctccgtatcagagttgagatgtgcctttacccctcacgagggccttttggggagtcccaggaggtgctgagctgcgccccctcctccaggagctgcagatgaagcgtactgcaattgaggccttcaatgagactatcaagatctttgaagagcagggccagactcaagagaaatgcagcaaggaatacctggagcgcttccggcgtgagggcaacgagaaagagatgcaaaggtgagtctggcgcctctgccctgccccaccccaccctgatctggtgcagtacaagccagggagggaaggaagcagaaggaggccagccacttggaggcaaagagtagtctgttgaaatggactttgggcctggtgcgatggctcaggcctgtaatcccagcactttaggaggccgaggcgggtggatctcctgaggccaggagtttgaaaccagcctggccaacatggtgaaaccctgtctctattaaaaatacaaaaattagctaggcatgatggtgcgcacctgtagtcccagctacttgggaggctgaggcaggagaatcgcttgaacctggagttggaggttgcagtgagccgagattgcaccactgcactccagcttgggtgacagagaaagactgtctcaaaaaaaaaaaaaaaaaagaaatgggctttgaaggatgaataggagtttgctagaaagagaaatcagaggaaacagcatatgcacaggctcagaggctggaagcacatagtctggtgcaaagtaggtccttgagaaaaccctggaggccgggtgcagtggctcattcctgcaaccccaacactgtgggaggctgaggcaggaggattgcttgatcccaggagtttgagaccagcctgggcaacatggcaaaatctacctctacaaaaaatattaaaatgttagccagacatggtggtgcacacctgtggtcccagctactcgggaggctgaggtaggagggtcacctgagcccaggagtttgagggtgcagtgagccgagataaaaccctgaggtctctgcgccaccccacccctcccacaggatcctgctgaactccgagcggctcaagtcccgcattgccgagatccatgagagccgcacgaagctggagcagcagctgcgggcccaggcctcggacaacagagagatcgacaagcgcatgaacagcctcaagccggacctcatgcagctgcgcaagatccgagaccagtacctcgtgtaagtggcggctccatacttccctgcggctccctggcgactgctgcggcacatggagatctctctaggagtctcagtctctctctctccaccaagtggcccttcctgggccccgagaccccttaaactcggttcctcccgggccccttgaaagttttcccataggtcagcctcagcttagtcagaggtgtgtgcaatgggagtgtcactcctatcccattccattttgtggaaagttggaagccttccacaaaaattcctgctgggctgggcgcaatggctcacacctgtaatcccagcactttgggaggctgaggcgggcagatggatcacttgaggccaggagttcaagaccagcctggccaacatggtgaaaccccgtctctactaaaaataaaaaatacaaaacccggccaggcatggtggtgggcgcctgtaatcccagttactcaagaggctgaggcaggagaatcacttgaacggggaggtggagtttgcagtgagcagagattatgccaatgcagttcagcctgggcaacagagcaacactctgcctcagaaaagaaaagaaaaaaaaaatcgcctgctgtgcaacctaccatgctgggtggctgcggcagccctgtcctgggttcaaatcagttcaaatcctgcccccacccaccaacctcctgaagacctcagccagagcctccacctccctcttgggcctcagggagggcactgtcgcgtgccaggtgctgtgctaagcaccgtgctcgttatgagttcatttggtccttttcaagccctttgtaaagtttgccctttacagctggggagactgaggcacagaaccgacagctgccctgtgcaaaggccagcagtgctggagtgagcctctggtgatgatgaggggcctgggctggcatcttcttgggggactccataggcgttaacagaaacaaaaaaatgaggggtgtgggtcagggttccccagcagagctgggcgagccaccctgggttcaggctgccctgagccaggtcagctctgccctcttgtggcaaccggagatattgtacccagaaccctctctcctcagccagaccctgcctcccaccggacaggcccactgtgggctcagcacccacacaactgcacaagcccacctttcctgttccttctcaggtggctcacccagaaaggcgcccggcagaagaaaatcaacgagtggctggggattaaaaatgagactgaggagtgagtgaccgtctggagggaggcagggagggcttcccagaggagggggccatttggggtgggtttcgaagaatgagtaggagttcaccagggaggaaaagttgtccaggcagctggggagcctcggaggctggcaggtgagtgaccagggccctccccgccaccgccccccaccccagccagtacgcactcatggaggacgaggacgatctcccgcaccacgaggaacgcacttggtacgtgggcaagatcaaccgcacgcaggcagaggagatgctgagtggcaagcgggatggcaccttcctcatccgcgagagcagccagcggggctgctacgcctgctccgtggtgtgagtggaccgcagcggtggggattcccgcgtccctcccagagctctcattgaatgcctgccgcgtgccaggccttgggaaggagtccctggtggggtcatccgggacaggggagcacgcggccctggaacggggaaagcttggcggggaggccagccttccgactccccctctcgtctgcccccacagagtggacggcgacaccaagcactgcgtcatctaccgcacggccaccggcttcggcttcgcggagccctacaacctgtacgggtcgctgaaggagctggtgctgcactaccagcacgcctcgctggtgcagcacaacgacgcgctcaccgtcaccctggcgcacccagtgcgcgccccgggccccggcccgccgcctgccgcccgctgagcaccgaggacccgccccaagcagagccgcccctgggcccgtctgcgccggaggctgcggcggcgggagccacggaccagaccagccacatccaggggtcctcatttctccggctctggctcttgtttggggttctctcaccctctttctctttccttccctcccccattctccagatctccctctgtctccttttctctgtctttcttggcccctgtctctctccatgttgggggtcctaactcccccaccccatatctacgtgtcctccgggcattgccctctccatggctctggtcaccctgaccctctgccctgcccaccgcaggtcccccggggtcccggaagccccttctggctgcacctgccatgtttacagagggcccctgggctgcgcggccccagcctgggcaccctgatttttaagccatagacctggggtcagggcaggaaggaacttcactctgctgcttccgagaacctcggccgtgacattcggggccgggcgggacccgccccacagactccaacttcccctccaaaccccgaagtgaaacccgccaccgggttacccccacaagggggccgctgcgagaagttcacccacccccgaaaaaataattaaactcgcaggccaggcacggtggctcatgcctgtaatcccagcactttgggaggccaagacgggcggatcttttgaggtcgggagttggaggccagcctggccaaaatggcaaaaccccgcatctactaaaatacaaaaattagccgggcgtggtggcggccgcctgtaatcccagctacttgggaggctgaggcgtgagaatctcttgaacccaggagatggaggttgcagtgagcagagatcgtgccactgcactccagcctgggtaacagagggagactcctccgtctcaaaaaaataaataaataaacttgtgagctggccccaacccctcctaggaatcacagctccccgtactggtgccgccgcagtggccaagttgcgacactgcccacggcccctccctctgatgcagattcagggcttctcttcgatcatgttgggttttgattctgtttttccttgactgcaaaaccctctttcctctcctcttttgggacaagagccctggttttctacgctgcccttggccaccacactgcctgccccacgagctgggaggcaggttttgtacggtacgttgttattgatatgatataaaacatcaaacgtcgtgggtgattctgttgtcagtgactgggcttcagtaccacctctgcgtgtcggggaccctggtgtctacgggggtcacagcaggtcggacccgtgggtttaactccaagcccctctgagacccgacaacccctccctcccccagtttagctgctcaagcctggagaggttgaggcagtgcccaaggtcatacaggagagagattcgaatcctgagctcccgactgctcaggggaccccagaccccatccagcccctcaagtgcttccaagctgcttcccccgcccaccgcccccaaatttgaatcctgtcgcaaccatcagctgtgtccttgggaaagttgtatcccctccctgatccacagcttcctcattcattgccaagtggcgtcaaaagtcaaaaccctcccatgccacagggaggagtctcccgtgtctttgatgttctcaagtcgtcggcacctccagccagcattggaggctcttctctgacctctcctcacccactcccatgcacagcccgccgggtcccaggagacgctgagcaaaagccctgtggggttttttgtgtttctttttaaagagtcaaggtctctcactctgtcacccaggctggagtgcagttgtgcgaacacagctcgcggctcacagcctcaagctcctggttcccagcctcaagcagtcctctcatctcagcctttagagtcactggattacgggtgtgtgtcaccatgtccagctaattatttttaaatttttttagaaacaagatcttgccgagtgcagtggctcacacctgtaattccagcacttggggaagccaaggcaggcagatcacttgaggtcaggagtttgagaccagcctggccaacatggtaaaacctggtctccactaaaaatacaaaaaaaaattagccagacatggtggcgcatgcctgtaatcccagctacttgggaggctgagataggaagatcagatgaacctgggaggtcaacgctgcaccaagccaagatcgtgccactgttctccagcctgggtgacagagtgagactctgtctcaagaaaaaaaaaaaaaaaaagggtcttgcccttttccaggtgggtctcaaactcctggcctctagtgatcctcccacctcagcctccctgagtcgcgtaagccaccacgcgtggcctcatggcgtctttgacttggactcctgtttaccaccctccccatcacacccagaatccacacccccactgcgacgtcattgtcccttcagccctccccaaccctggggcctcactgtccttgtctgttttgtacagccacctctcaaggcccaacaaggctgaacctggggcaagtgcagaaagaaacctccactctgacccagtctactgctgggaccttgggacaggacctgcctcccttagcctcagagccccctagccttgccaggcactgtccctgccatgtgtcctgtctggagataacccataaataactccagcccagattgtgcctctcactgcataggtgctcacaggagaaaggttgccatctttatgatcccagctatgctgagctgggggtggaagagaatatcccgtgtggtctctaaaaacactcaaccactggctgtgtgtccttggcaaaatagccttccctctctgatcagccatttatttgttaccagctggagtcagtagcacctacccccagccccaactggatgcttctgagggttcaatgataaaatgggttgtaggcccactctatgcctggcaccaagccagagagcaatacattgtagggttacatttatgatttcttccaatagggctggtgcctggtaactactggaaaaattgtagcaattatatttatggttatttcttcaatcccacccggcatagggtaagcaccaaagttggggtggtgagtcttggggagcctttgccaacggtttggtcgtctgagggatgggctcggggaccatccagccactgggacttcagagaagctccggctcccaaaccagctactgtgtgtgtggccagggtcttccccacaactagaggggggcacagctggggactcaggtatatcttccagctgggtgtgggacattttcttccctaggatccgatgtgtcttgccctgaatgtaaggcctggcagggttggaatgtctcagttattcccccaacactccagcctccatctgggccttttttccaggctattctctctgccttcactgttggggccactgtcctgtgtaggcaccaaggcctgaccatgccatccagaagccccagcctgggacaactctcccccacctgcctctgagccctccatggtgactcttgttccccaaaccttatccttctccccattacacagaagggaaagctgaggctctgtcactcaaatccaaagccaggtggactccaagccaccccacccctatcccagacagcacaggctgcctctctcccccatgggcgtcccttgaaggccaggttgccccccaccccccacaagccttgaacgatgaaaagaaggaaggccagttctcttcaccccaagccagaagtggggctgggtgggtaccctagagaaatgacacgccactccctgcgccagcttctgctttccggcgtggctgtggtcaagcctgagtcagtcccacgggaccacggtgaggggtctggagcgtcggggtcaggagtttgaggggggaagggttgaggggcaggatgtgggggttgggtgtgagggaggtcacgggcgagactggagggaggagacctggccacacaggccttgcccactctcgggggcctgaatatttcagttactcccccaaaaccccggcctccatcccatccccagcctccatccgacgtcacccctgttaggtcacaggcccactctgagagtgggtctcgggcctcaagtcccctagccgcccctagaaggtctaggggtgcgtggagacaccaccattcctctcagcctgtgtctgtctcaaaggccccacctcacctcccctaaaggtagtcttgcgccagggctcacgtgcctgggcagggctgattgccaaggggcccaatggcctcgtgactggggacccagcacctggcaggggtgggggtgggacactcagaggaaggagtggaggagggagagacgctggcccgggacccgaggggcgtgggcatcgggaggcgggcccgggttaggggcgggaccgccgcctggttaaaggcgcttatttcccaggcagccgctgcagtcgccacacctttgcccctgctgcgatgaccctgtcgccacttctgctgttcctgccaccgctgctgctgctgctggacgtccccacggcggcggtgcaggcgtcccctctgcaagcgttagacttctttgggaatgggccaccagttaactacaaggtagggacggcgacagggcgggcaggctggagggaacaggcgccctgtcggggcacgcggctccttctttctccccagacttcacaggggaagaccagggccccgaggggacgctgtccctgccgggttcctggaaaaaccctgttcagttcccggcgctgcggccacactccctccgtgccgtttcgctttcgcatcccgcatctgagaggcgcagctgcctccacccgcctagtcccgcccaagggttcaatgagcgcctactgtgtacttttggggcaggagctggggtctccttttgtggcccagggcacaagttcagcagctggccaagggccgccggcatgcattcttgctgctacccttgatgcattcattccagccagggcagggctcgcgtgtctttgggacctattaggcagatgccctagaggctgagcgacttgctcaccgctccagcgacatgggccacccgccacccctcagctgaagccggaagtcagcacctattaggtgccgcctctattcagtcggacttggaaagggttcacgtggatcccttgctcagctcagaggcaaggtctccaggtgaagtgacaagaaatgagcatgggccaaggccggaggcggtggctcatgcctgtaatcccaacactttggaagtctgaggcaggcagatcacgaggtcaggagttcgagaccattctggcctacatggagaaaccctgtctctactaaaaatacaaaaattagctgggtgtggtggcatgtgcctataatcccagctactcaggaggctgaggcaggacaattgcttgaaccagggagtcgggtgttgcagtgagccgagatcgtgccgcagcacaccagcctagcgacagtgagactccatctcaaaaaaaaaaaaaaaagtctcaaagtcaagattccacctggcaagttctggaaggcgtgcaagatgaattgcgtatcacagccccctttctacaagactaccaagtggggttgagagaagtggggaactgcccagggctacacctgcctcccacgccttcctaatccacagacaggcaatctatacctgcgggggcccctgaagaagtccaatgcaccgcttgtcaatgtgaccctctactatgaagcactgtgcggtggctgccgagccttcctgatccgggagctcttcccaacatggctgttggtcatggagatcctcaatgtcacgctggtgccctacggaaacgcacaggtgtgtgggcgctggggaaactgaggcacgtgggcaggggagcaggggacccagcctaccagcaggctctcaccctgctgccttgcaggaacaaaatgtcagtggcaggtgggagttcaagtgccagcatggagaagaggagtgcaaattcaacaaggtggaggtgagcggccccagggccccacactggggtgggggaaaactgtcccacgtacaggaggcaaatacgaggatgccagctctgtcttctgcctcgtgtgctcccatttaatcacatctttattccctatctcctgggtgggtactggtgattattacgagagggtgtcagggtaccctaggccctcttcatgccctctcctgccccctctccaaaccccaggcctgcgtgttggatgaacttgacatggagctagccttcctgaccattgtctgcatggaagagtttgaggacatggagagaagtctgccactagtgagtgacgcccctcactccacccaaggagggggacatgggtggtaaccttccctgcatccaggcagacccaaattcaagtcctagccctgaccactgctgtctgtgcagcccaggaaaacaactacccttctttattttatttatttttttattttttcttgagacagagtctcgctctgtcgcccaggctggaatgcagtggcgcaatcccagctcactgcaacctccacctccagggttcaagtgattctccagcctcagcctcctgagtagctgggattacagttgtgtgccaccatgcccagctaatttttgtgtttttagtagagacagggtttcaccatgttggtcaggcttgtcttgaactcctgaccttgtgatccgcctgccttggcctcccaaagtgctgggattacaggcgtgagccaccgcacccagccctttttttttttttttttttttttttttttttgagacagggttttgctctgtcgcccaggctggagtgcagtggtgcaatcttggctgactgcaaccactgtctcctcagtttaagtgatcctcctgcctcagcttccccagtagctgggactacaggtgtgcaccaccatgcccggctaatttttgtatttttagtagagacagtgttcaccatgttggccaggctggtctcaaactcctgacctcaagttatccgcctgtcccagcctcccaaaggattacaggtgtaagccaccacgcccggccccagcctcccctcttgaagcctccatctctgaatcaggggaatgaatgcaggtctcttaggagcatgagtgatcacagaggacttactggaggaggcatttctgagctgggcatggaaggatgagcaggaatgtgcagagacacagatgatgggatgtggagatgataggacagaccccacctacttccccgggggattgtgaagaatgactcccagagaagtgactcattggctccaatcatttattcattcatcaaacatccgggtcacccaagaggcctcacctagtgacaccctagtcctgcagggttagatcagggctgagagagtggcaaggagagggcactgaggagacactgtggaaggaggatgaagggtgttcctggcagagggatcagcctgtgtggaggtcctgagtaaagtgagatactatgggggtcagaggcagtgggtctggtcttagggatgaaaccaagggagctaggaggcaggagcagcccaagccctgccttaggggcctccactcaagcatgtattgagcacctgctgtttgtgggctttgtcgcatcactgtgaagccaactgtaccctcttctcagtgacgaaacaggcttggctcagggctggtgggcgggaccgttgagataacggggaggaagctgaggcaaccccctgctccccacccacccagtgcctgcagctctacgccccagggctgtcgccagacactatcatggagtgtgcaatgggggaccgcggcatgcagctcatgcacgccaacgcccagcggacagatgctctccagccaccacacgagtatgtgccctgggtcaccgtcaatggggtaagaatctttttagccctcagcttgacactcatagtcccatggagtcagggatggacaagacagagggaccagagataaaggaacccaggcggaggttgcagtgagctgagatcatgccactgcactccagcctgggcaacaagagcaaaacttgatagctttgcatagggaaagagggcattgatgctggggttttgaaaggtgagtaggagtccatcaggcaaaaaaagtatgtattaattcgaagtattaaacatccctagccacccccattgggaaagatgtgccactgatttgcgaggcgggaggcgggggccagacttgggaatatgtgcagccctttctgggctggaaccagggtgcatgggttggggtagctgctgggaatatgcgacccctgtcttgctttgtgcagaaacccttggaagatcagacccagctccttacccttgtctgccagttgtaccaggtaagctgggaggggagcagtgggattcaggtggtgggggtagggtctccttccaggaccccaactcatggccttcacctccagggcaagaagccggatgtctgcccttcctcaaccagctccctcaggagtgtttgcttcaagtgatggccggtgagctgcggagagctcatggaaggcgagtgggaacccggctgcctgcctttttttctgatccagaccctcggcacctgctacttaccaactggaaaattttatgcatcccatgaagcccagatacacaaaattccaccccatgatcaagaatcctgctccactaagaatggtgctaaagtaaaactagtttaataagcccttctggatggtgtaattaatttgataagtcagccattcccccttccccaggcctggcaaaacccgctctctactaaaaatacaaaaattagccaggcgcggtggcgggcgcctgtaatcccagctacttgggaggctgaggcaggagaattgcttgaacccggcaggcagaggttgcagtgagccgaaatcgcgccactgtgctccagcctgggcgacaagagcaaaattccatctcaaaattttaaaaaagtgactggttgtggccgggtgaggtggctcacgtctataattcctgcactttgggaggtcaaggtaggaggattgcttgaggacaggagtttgacaccagctttggcatgaaagcaagaccctgtctttacaaaacatgaaaataaaaagaattagcaggacatggcagcgagcaactgtggtactcgggaggctgaggcaggaggatcacttgagcacaggaggtcaaggctgcagtgagccataattacaccactgcactgcagcctgggccagagagcaagactctgcctctttttttttttttttttttttttttttttgagacggagtttcgctcttgttgcccaggctgaagggaaacgcgtgatctcggttcaccacaacctctgcctcttcagttcaagcgattctcctgcctcagcctcctgagtagctgggattacagacacatgccaccacgcccagctaattttgtgtttttagtagagacagggttcttccatgttggtcaggctagtctcgaactcctgacctcatgatccatctgtctcggcctcccaaagtgctgggattacaggcgaaagccaccacacccagccaagactctgccttttaaaagaaaaagaagggaaagaacatgttcagtgttgtattttttcctactgatggactggtcaaatcatagatgtatatattcttccttcgaggaagtgaggcttaattccactccctacaaatatctttgtttctctttattttgagatggagtctagctgtgttgcccaggctggtctcaaactcgtgggctcaagcgatccttcttgaggatcctgaagtgctgcgattatagacgtgagccagcgtgccgggccctacaaccaccttgacagtgaactagattgagtaacttgattccaaagagtagaacaggaaaagtgaaaaagaataccccggctgtgcgcggtggctcaaacctgtaatcacagcactttgggaggctgaggtgggtggatcacttgaggtcaggagttcaagaccagcctggccaacatggcgaaaccctgtctctactaaaaatacaaaaattaggctggatgcggtgtctcacacctgtaatcccagcactttgggaggcccaggcaggcagatcacctaaggtcagaagtttgagaccagcctggcaaacatggcaaaaccctgtctctactaaaaaatacaaaagttggtcaggcgcggtggctcacgcctgtaatctcagcactttgggaggccgaggcgggtggatcacaaggtcaggagatcaagtccatcctggctaacacggtgaaaccccgtctctactaaaaatacaaaaaactagctgggcgtggtggcaggcacctgtagtcccagctactcgggaggctgaggcaggaaaatggcgtgaacctgggaggcggagcttgcagtgagccaagatcatgccactgtactccagcctgggcgacagagcaagactctgtctcaaaaaaaaaaatttaaaaaatacaaaagttagccatgcgtggtggtgcacgcctgtaatcccagctactccagaggctgagatgggagaatggcttgaacccgggaggcaggggttgcagtgagccgagatcacgccactgctctccagcctgggcaacagagagagaccccatctcaaaataaataaataaataaatacaaatcatcaagtagcaaaggtggcatgttttgaggtggcacgtcctgaacttcctcattccctggctgaattggtggtggagagaaattcagggtagaagttctgaagtaacacatctacagaaggggtagaaaaagacagattagaacaaatagaaaggaataaatataagcacactatgccagatattgtcgaatcagtatctttgtcctgagaataggttagcttggttacacacttgtatctcattttattttatttatttatttattttttgagacggagtttcgctcttgttacccgggctggagtgcaatggcatgatcgtggtcttggctcaccacaacctccacctctggagttcgagcgattctcttgcctcagcctcccaagtagctggaattacaggcatgcgccaccacacccagctaattttgtatttttttttttttttttgagacggagttttgctcttgttgaccaggctggagtgcaatggcatgatctcggctcactgcaacctccgcctcccaggttcaagcaattctcctgcctcagcctcccgagtagctgggattacaggcatgcaccatcatgcccggctaatttgttgtatttttagtagagacggggtttctccaagtcgaggctggtctcgaactcctgacctcaggtgatccgcccgcctcggcctcccaaagtgctgggattacaggcgtgagccaccgcgcccagcaattttgtatttttagtagagacggggtttcaccatgttggccaggatcgtctccaactcccgacctcaagtgatctgcctacctcggcctcccaaagtgctgggattacaagtatgagccactgcacccagccttgtgtctcattttagaaggtggtggcttaggagggagttgggaacctatctaagttaggtctctaaatggtgtgagcaatcaggcatttaatgagcatttcttctttctctctctctctgtctccccaccctcactttccttccttccctttttttttttttttttttttttttttgagacagagtctcgctttgtcacccatgccggaaagcagtggtgcaatctcagctcactgcagcctccaccttctgggctcaaccagagtagctgggactaaaggcatatgccaccatgcctggctaatttttttttttcccgtttgagacggagtctcactctgtcgcccagcctggagtgcagtggcacattctgagctcactgcaacctccacctcccaggttcaagagagtctcctgcctcagcctcccgagtagctgggactacaagcgggtgctaccacacctggctatttttttttttttagtagagatggggtttcatcgtgttagccaggatggtctcgatcccctgacctcatgatccacccgcctcagcctcctaaagtgctgggattacaggcgcaagccaccgcgcccagccacacctgactaatttttgtattggtagtggagacggggtttcgccatgttgctcaaactggtctcaaagtcctggactcgagcgatctgtccgccttggcctcccaaagtgctgggattacaggcgtgagccactgcgcccagctcttcctttcctactctacaggatctggctctgttgcccaggctggagtgcagtggcacaatcatagctcactgcagccatgacctcctggactcaagcaatcctcctgcctcagcctcttaagtcgctgggactacaggctggagtgcagtggcgcgatcttggctcactgcaacctccacctcccaggttcaagtgattctcttgcctcagcctcccaagtagctgggattacaggcacatgccaccacacccaagtgatttttatatttttagtagagacagggtttcaccatttggaccaggctggtcttgaactcctgacctcgtgatccacccgcctcagcctctcaaagtgctgggattacaggcatgagccactgcgccccaccccgaagttcacatttacaaacagattttgaaaacaatatttaagcaggcatactataaaacataattattgttgaaaagcttatttacaagctttcatctcactttcatttaacttacttgtgttcaacaattatgcttaattactcatgaacatttcataaaacattgaaaaaataatcatcatcttaagttacttttcttgttgacaaatcaagtatcaaaaatcaaagaagcaaagaacctaaaaaaataaatatatgggacgcagcaccatggctcacacctgtaatcccagcactttgggaggccacggtgggaggatcactggagaccaggagttcaagaccagcctggccaacacagtgagatcccatctctataaaaaatacaaaaattggccaggcgtggtggctcgtgcctgtaatcccagcactttgggaggctgaggcgggcagatcacctgaggtcgggagttcaagaccagcctgaccaacatggagaaaccccatctccattaaaaatacattagctgggtgtggtggtggtagctctaatcccagctactcgggaggctgaggcagcagaatcgcttgaacctgggaggcagaggttgcggttagccgaaatcacaccattgcacttgagcctgggcaacaagagcaaaactcaatctcaaaaaaaaaaaaaaatagccaggcctggtggctcacacctgtaatcctagctactcgggaggctgaggcatgagaatcacttgaacctgggaggctgcagtgagctgagatcatgccactgcactccagcctgggcgacagagcaagaccttatctcaaaaaataaccatccaaggaaccaaaaaaaattaaaaacccacatatgggtctctcctttactttttaaaattaattttattgtcaggcttgacatccattaagcaaatcacctttttttttttttttttcagacagggtctcactctgtcacccagactggagtgcagtgaggtgacatcacagctcactgcaacctctgcctccagggctcaagcgatcctcccaccccagcctcccgagtgtctggaactacaggcacaagccacaacactcagctaattttctatatttttagtagagacagcttttcactatgttacccaggctggtctcaaactcctggactcaagcaatccgcctgccttggcctcccagagtgctgggattgcaggcatgagccaccgtgcccaccctcaattcacttcgtaaaaatttttttatttattttttgagacagggtcttgttctgtcacccaggctggagtgcagtaatgtgatcacagctcactgcaacctccatttccagggctcaggcgatcctccctgctcagcctcccgaatagctgggacaacaggtgcgagccacgagccagcatgcgtggtaaatttttgtattttttttttttttttttgcagagatggggttttgccatgttgcccaggctgttcttgaactcctggcttcaaatgacctacctccatcagcctcccaaagtgctgggatggatgacagatctgagccaccacctggccaagcaattcacttttattgcatgtattgttcttaggtttattttatagttttacagtttacacttttataatcttcaacatctaaagataacataagcctgtttgactagtcttaatttacataagcaaatgtggttttctaaagtcaatgaaatagagctcctttacaagttaatctttaggaattccatcaagagggagaaagtgttacatacctataacatatatatatataaacataaataggtgcagtcagaaatcttatagctttcattttaaaattatagctgtgagacaggtgtgataatacaaaactcactagtttttaaaaaaatggtggagccgggcacagtggctcacgcctgtaatcctagcactttgagaggccgaggcaggcagatcatttgaggccagggagttcaagaccagcctgggcaacatggagaagccccatctctactaaaaatacaaaaattagccaggcgcagtgactcacgcccataatcccagtactttgggaggccgaagtgggctgatcacctcaggttgggagttcaagaccagcctgaccaacatggagaaaccctgtcgctaccaaaaatacaaaattggccaggtgtggtggcacatgcctgtagtcccagctactcgggaggctgaggcaggagaatcacttgaacccaggagacagaggttgcagtgagctgagatcgtgcctctgcactccagtctgggtgacagagccagactcaatctcaaaaaatataaataaataaataagtgagatccaatttgcatctgcagaggcagatgaaatgagttaagattacctactcagatcatgaaagctttgtgctaacatttgtaaagactgttaaaatttttcacttgccagttggtttccaaattgccctctgagaacacagttctgatccattgcaggggagccccaaattttgggcttagcccaggagggctcttggcttcttctaggaaagtatccaagggtgacctggtggtgttatacagcacctttttttttttccctgaaagagtcttgctctgttgcccagcctggaatgcagtgatgtgatcacagctcactgcagtctccaaatcctgggctctagaatcccctttgcctcaaacttctgagtagctgggactacaggcatgcaccacctatccgagctaattttttaaatttttgtggagatggggtcttgctatgttccccaggctggtctcaaactcctgagctcaagtgatcctcctgcttcagcctcccaaagtgctgggatcacaggtgtgagccataatcccagcctgataagaattcgtccttttcttttttttttttgagacggagtctggctctgttgcccaggctggagtgcagtggtactttctcggctcactgcaacctccatttcccgggttcaagcggttcttctgcctcagcctcccgattagctgggattacaggtgcctgccactacgcctggataatttttttgtatttttagtagagacggggtttcaccatgttggccaggctggtcttgaactcctgacctcaggtgatccacccacctcggcctcccaaagtgctgggattactggtgtgagtcaccgtgccagcctttttttttttttttttttttttctgagacaaagtctcactctgttgcccaggctggaattcagtggtgctatctcagctcactgaaaccccagcttcccaggtttcagtgattctcctgcctcagactcccgagtaactgggactacaggcacacaccaccacactcagctaattttgctattttttggtagagatggggtttcaccgtgttggccagactggtcttgatctcctgacctcaagtaatccacccacctcagcctctcaaaaagctgggattacaggcatgagccaccgcgtccggctgaattcttactttgcattggcttgtcaggtcccagcatttctcccctgcagaccccagagggagcagatattcccagccaattgtagcccatcctcatcaccagaaactagcagggctagagctttcctcctctctctggtgtctggctcagactgacagacagattaacaaaacaatagcacacaaagcttattcattgtagatgggagccctcacgagaaaaatggagaccgaaaaaagtaactagacctaagtgtttgttttgagacagggtcttgctgtgtcatccagactggagtgcagtagcgggatcacagctcactgaagccttgacctctcaggcccaagcaatcctcctgtctcagcctcccaagtagttgggactagagttgcacaccaccacacctggctaattttttaaaaattttggccgggcacggtagctcatgcctgtaatcccagtactttgtgaggcagaggctgggggatcacctgaggtcaggagttcaagaccagcctggccaacatgataaaacccgtctctagtaaaaatacaaaaattagccaggcgtggtggcgggcgcccataatcctagctacttgggaggctgaggcaggagaatcacttgaacctgggtggcggaggttgcagtgagctgagatcgcgccactgcactccagcctgggcaacagagtgagactccttctcaaaaataaagaaaaaataaaaagatagatcacagagcccttctgggctggctgcggtggttcgtgcctgtaatcctagaattttgggaggctgagatgggcagataactgaggtcaggggatcaagaccagccagaccaacatggcaaaaccccgtctctactagacatacaaaaattagccggccatggtggtacatgcctgtaatcccagatacttggaaggctgagataagagaatcacttgaacccgggaggtggaggttgcagtgagccaagatcatgccactgcactccagactgggcaacagagtgagactccctctcaaaaaaataaaaagaagagcccttcttgcatccactgtttgcaagtgtgtttaactcaaaattctcaatatcaatatgccaaagttgtatgctggtatgttatgggtgacatgtcctgaacactatcaacagaaacatacaaaaattactgccaggtatcaaaagctgctcttcctgggaagcaataaagtatcttttgtttttctgtttttgagacagagcctggctctgtcgcccaggctggagtgcaatgacaagatctcggctcactgcaacctttgcctcccgggttcaagtgattctcccgcctcagcctcccatgtagctgggattacaggcacccgccatcatgcctggctgatttttgtatttttagtagagacggggtttcactatgttggccaggctggtcttgaactcccgacatcaggtgatccgcctgcctcggcctcccaaagtgatggaattacagccatgacccaccgcacccagccccataaattctcttaattttattttttattttactttttgaggcagggtctcgctgtgtcatccaggccagagtgtagtgtcaccatctcagccagctgaagactcagcctctgggactcaagcgatcctcccacgtcagcctctcaagtagctgggactacaggtgtgcactaccgtacccggataattttgttatccggtcttaccatgttacctggtcttaccatgttgcccaggcatctgggcaactccaactcctgacctcaagcgatcctcctgcatccaggtcccaaatggtaggattacaggcataagccaccgagcccggccaagcaacaatttttttttttttttttgagacaaaatctcgctctgtcgcccaggctggagtgcaatggcatgatctcagctcactgcaaactccgcctcccaggttcaagcgattctcctgcctcagcctccaagtagctcagattacagacatgcaccaccacacctagctaatttttgtatttttagtagagatggggttttgccatgttggcctgactggccttgaactcctgacctcaagtgatccacccgccccagcctcccaaagtgctcggattacaggcatgagccaccgtgcctggccaataaattcttaatttatccaccattgtctctcagcaaccagtaatccatttgtagattaccaaatggtcagctcaatgtcaaacaaaactatgggagaccactgttttggactgagctcctgcactaggcaccaacagaccagatgaaaccagaatggagtcactcgtgctaaatgccacataatcaaactgaaactttgaggaagcagacatatcccaaacagatcagtttcttattttttttttttttaaatttgttttgtagagatgaggttctggccaagttgcccaggctggtcttgaactcctggcctcaagcgatcctcctgcctcagcctcccaaggtgctggtattataggcatggtccactgtgcccagctgtctttcctaaaaatagattttagtctacctgggccgggcacggtggctcatgcctgtaatcccagcactttgggaggccgaggtgggcggatcacaaggtcaggagatcgagaccatcctggctaacatggtgaaaccccctctctactaaaaatacaaaaaattagccaggcgtggtggctggtgcctgtggtcccagctactggggaggctgaggcaggagaatggcgtgagcccgggaggcggagcttgcagcgagccgagatcgcgccactgcactccagcctgggcgacagagcgagactctgtctcaaaaaaaaaagattttagtctacctgaattagcccgataaggaagtcccctctgctttaacacttaccaaaaaaagtaacctgaagttaatcaggtttttctttttctttctttctttctttctttttttttttttttttttttgagatagagtctagctctgtcgccaggctggagtgcaagtggcacgatcttggctcactgcaacctccacctccccgggttcacgccattctcctgcctcagcctctctgagtaactgggactacgggcgcccgccaccacacccgtctaattttttgtatttttagtagagacggggtttcactgtggtctcgatctcctgacctcatgatccgcccacctcggcctcccaaagtgctgggattacaggcgtgagccaccgcaccggccttattattattattattttttaagatattctgtagttatggattggaaaaatccatattgtcaaaatgtccatactacacaaagcaacctacagattcaatgcaatttccatcaaaatacaataccaatgacattcttcacacaaaacagaaagaacagttctaaaaaacagtcctaaatttatatgaaatcacaaaagaccttgaatagccaaaactatcctgagcaaacagaacaaaactggaggaatcccattacccaacattcaattatactatagatctacagtaacaaaaacagcatagtaccagcacaaaaatagacacatacataaatggaacagaatggagaacccagaaccaaatccatacatctacattgaattcttttttactattattatactttaagttctgggatccatgtgcagaacgtgcagaaggtgcaggtttgttacataggtatgtatacacgtgccatggtggtttgctgcacccatcaaccggtcatctacattaggtatttctcctaatgctggccgggtgcggtggctcacgcttgtaatcccagcactttgggaggccgaggcgggctgatcacgaggtcaggagatcgagaccaaggtgaaaccccgtctctactaaaaatacaaaaaattagacgggcgtggtggcgggcgcctgtagtcccagttactcggagaggctgaggcaggagaatggcgtgaacccgggaggcggagcttgcagccagccgagatcgcgccactgcactccagcctggatgacagagcgagactccgtctcaaaaaaaaaaaaaaaaaaaagaagttatttctcctaatgctatccctcccctatcccaccctctgacaggtcccggaatgtgatgttcccctccctgtgtccatgtgttctcattgttcaactcccactttctttttctttttttttttttttgagacagtctggctctgtcacccaggctggagtgcggtggcgcaatctcggctcactgcagcctctgcctccagggttcaagcgactcccctgcctcaccctccggagtagctggaatcacaggtgggggccaccacacccagtggtttgtttgtttgtttgtttgtttgtttgtttgttttttgagacggagtctcgccctgttgccaggccggagtgcagtggtgagatctcggctcactgcaacctccacctcccgggttcaagcgattctcctgcctcagcctcttgagtagctgggactacaggcgtgtgccaccgtgcccagctcatttttgtatttttagtagaaacggtgtttcaccgtgttgaccagattggtctcaatcacttggcctcatgattcggacgccttggcctccctaagtactgggattacaggcctgagccacctcgcccggcattgatcaggttttttttgtattgttctgtttatttgtcccactttacgaaactcactgttctcctattgcccagggggacatgtcattttatctattctcagtaactcatgcctgtaattccagcacttttggatgcaaaagtgggcggattgcttcagtacagttcaaggctagcctgggcaacatagtgagaccctgtctctactaaagaggaaaaaaaaacaaaacctttctttaaataaaagttttaaattgggggaaggaaggaagaaggctctatctcaaaaaaaaaatcagaaaaccatgaagggtgtcctctgactgggcaaatttttgttgtaaaaacccatattgtaggctgggcatggtggctcactcttgtaatcccagcactttgggaggccgaggcaggtggatttgagatcaggggttcaagaccagcctgagtaacatggtgaaaccccgtctctacaaaactacaaaaaatagctaggcatggcggcgggtgcctgtaatcccagctactcatgaggctgaggcaggagaatcgcttgaacctggaaggcaaatgttgctgtgagctgatattgtgccactgcactccagcctgggcaacagagtaagactccgtctcaaaaaaaaaaaaaagccatatttcagttttactttttacaggccaacaaatggcatgattgtgtttcaatgacgtttggcttattctatgacctgaaaattatatgaaatgcaaatttgtgtccataagtaaaactttattgaaacacaatcatgccatttgttgacaaaaagagtgaaactctgtaaaatatgggccgggcgcggtggctcacgcctgtaatcccagcactttgggaggccgaggcgggcggatcatgaggtcaggagatcgagaccatcctggctaacacggtgaaaccctgtctctactaaaaatataaaaaattagccgggtttggtggcgggaacctgtagtcccagctactcgccaggctgaggcgggaaaatggcgtgaacccgggaggtggagcttgcagtgagccaagatcgcgccactgcactctagcctgggccacagagcgagactctctcaaaaaaaaaaaagaaactccgtaaaatatttaaagaggttaattctgagccaaacgtgagtgaccacggccctaggcacagccttttttttttttttttttttttttttttgagacagtctcgctctgtggcccagactggagctatctcggttcactgcaacctccacctctcgggttcaagagattaccctgcctcagcctcccgagtggctgggattacaggcgcccaccaccacgcccctggctaatttctgtatttttaatagagatggggttttaccatgttggccaggctggttttgaattcctgacctcaggtgatccagctgcctccgcctcccaaactgtttgggattacaggcgtgagccactgcgcctggccaatccccaccttcttgactgaccatttaaaaaatgtaagaaacacctttagctcatcatgagcagcacaaaacaggcagggacaggatttggccctgaggcaggagaataggtctggaggcagggaacataaggccaaatcaaatggaaacaattcagctatgacaggaaatatcttctccatttaaagagggcatacatccagtaaatgactttgtaactttacttcatcctcttcatttacataggacgtacattaagtaaccagtgaaaacctctagagggcatttaaaccccagaaaattcttaaacaggtctcttgagtccgtatgctccactggctcccaccctgcggagtgtactttcgttttcaataaatctctgcttttgttaagcttcattctttccttgctttgtttgtgcactttgtccaattctttgttcaagatgccaagaacctgcacaccttcaacagttaacagcccacaggcagtagtttgcgactctagtagagaatgcatagggatttccattgaaaatcattttttaagccagttacggtggttcacgcctatcatcatcccagcaccttgggaggccaaggcgggtggatctcttgaggtcaggagttcgagaccagcctggctaacatggcaaaacccctgtctagaccaaaaatacaaaattagttgggcgtggtggcccgtgcctgtaatcccagctgtttgggaggctgcgacacgagaatcgcttgaacccgggagggagaggttgcggtgagccgagatcgcgccaccgcactccagcctgggtgacagagcgagactccatttcaaaaaaagaaaaaaaataattgttccctacgggaacggtataattaggatataattgtttctggccacagatcacatcccttctggttaagtccaggagaatctggaaatacgtagggcaaccaggccagaaggcgttgtaactgcctaagattgaccaaccctaacgcgggaggcgggacgacggtcactgatttgccagcgtgacgccggtctgcgactggccagtgccgtcctgggcgtgtcggtaggacggggctgcgacggtttcccataggctggcacagaaaggggcggggaaacaagagtgcaacgttaccaatcggcatgcgggacgtaacgcaattcttttttccgattggtccgtgaagctcgggaggtcgttgggggctcgaccttgggatagaacgcctgccttttattggtcaatactcttcgggccgggcaatgtggctccccgaggctgcctgcgattggtgaacgcgtcgcggctcggggcggacctgcggactgaagatccttatgcgattggccggggagccggaggggcgggcaatttgggatcgacagtgactcgcgactggtcggcgcggcgaaagcagagcggcgcgccggttccttggttcctgagggcgatggcgcggggtggctggcgccggctacgccgcctgttatccgcggggcagcttctattccagggccgcgcgctgctcgtcactaacacgctgggctgcggcgcgctcatggcggccggtgatggcgtgcgccagtcctgggagatccgcgcccggcccggccaggttttcgacccacggcgctccggtgaggacgccacgctgcttagtccttcaccccgggcgacctttgatcccgacacccgactgcgggccgtgacccctgacccgtggcctcagtcccccgcaggacccttgccctgaccgcgcctctccccgggtgtctgtctccccgcagctctgggtctccatcacctcccaacccccggaggtctctgcccactacccaggagcctctggagccgcgcctcctggtggggcttgtagtggaagaatgcacgggtgggctcttccggttttcccggtgaggctgaggctccgggatggcattgggcttacccaggccttagccagggagggagagagggaatggactgaggaacttgccggcccgacccagccccctgacttacactcttatagcgagcatgtttgcggtgggctgcagcatgggtcccttcctgcactactggtacttgtcgctggaccgcctattccctgcgtctggcctccgaggcttcccaaatgtcctcaagaaggtcctcgtggatcagctggtagcctctccattgctgggcgtctggtacttcttgggtaaggagcctcctaagcctaggctttgcctctcataggtcgggaggggtggagccagctttgtgttaagaaggatgcagaggtgcatttccaatttgccccctgtttgggtcgccctggactaggagccaggtcacagcggggacaggacggactcggccgatgtgaacgctggcgagtgtaggagggacgaggactgtatctgttggggctgccctgggcgggaggttgagagcatttcccaaagaaggggaccacactcagttgagacatgaagagggaaccagcgggcagagggaacagctaatgcaaaggctctgaggcctgaaggaagagaaattgaggctagacttaatggggtgcaaccgtgccagccctaggctcggtaaagacagcggtattaatagaggagtctctcattctccacctcccagcccggcttcctggtctgtgatggaaaagtaacacaactccctcaacttcagggtgtctccattggggcacgtgtttatatgtttataacctctctttctctcactgggactgacttgctctgttttgtctctacaccagctaccctaattctctgtccatcccatctgaaagtccctgtccctctgcccggggtgggcggcgtgggctctcaggggcccaaccccgccccctccatcgtcagcccatcttgtcgtctcaacagtacttcctggcctctaacactctcatttcttggtttgcttcccaggccttggctgcctggagggtcagacagtgggtgagagctgccaggagctgcgggagaagttctgggaattctacaaggtgggagcacccgccccttgcacatgtccggccccgccccctgatggccgctccgcccccgcccagctctggccccgcccctcatcccccgcctctccccgcaggcagactggtgcgtgtggcctgctgcgcagttcgtgaacttcctcttcgtgcccccccaatttcgagtcacctacatcaacggcctgacgctgggctgggacacgtacctgtcctacttgaagtaccgggtgagtgtggagggcataccaggcacccaggggactccccagggggctacacgtgtgagctccaagtggcagtgtagccagccaccctggagggtgggagtctcctgtgctcctgacaacccacacccaacagtgggctggcggagagctcctcactagcagttaagacccagccgtggctgagcgccgtggctcatgcctgtaatcccagcactttgggaggccgaagcgggtggatcgcctgaaattggagttagagagcagactgggcaatatggtgaaaccccttctctactaaaaatacaaaaaattactggtacgcacctgtaattccagttacttgagaggctgaggcaggagaattgcttgaacccaggaggcagaggctgcagtgagccaagatcatgccactgcactccagcctaggtgacagagcgagactccgtttcaaaaaaaaaagacccatgccgggcgcggtggctcacgcctgtaatcccagcactttgggaggccgaggcaggcggatcacgaggtcaggagatcgagaccgtcctggctaacatggtgaaaccctgtctctactaaaaatacaaaaaaaaaattagccgggcgtggtggcgggcgcctgtagtctcagctactccggaagctgagaccggagaatggcctgaacccgggcagcgaagcttgcagtgagccgagatcgcgccactgcactccagcctgggcgacagttcgagactccgtctcaaacaaacaaaaagacccaacccttctctgctgtctgatgtgacctcagcccggtccctgccaagtctgttgagcagggctgacctctggcccaagggcaggtagagggacagggagggatgagccaggcttctgaccagatgccttgtcttgtgtggacagagcccagttcctctgacacccccaggctgtgtggccctggacacccgagcagactgaactgtctgcttcctggaccagatgcaagactgtctcctggcggaccaccccctctgacagaaggggaatgggctcctgcagcaagctcgggtcttgagccacgtcccagcaccacttcagctccggagcattgggctgagccgccctttccaagctcacttctgggactgagtttcctcaaccggaacacacccatgaagatggatgatcatcccctagcccttctcagcaggaacctcatgcgacctgtgaccaagatgtcccatcctcagcacagggcccactctgccaaccagtctcaagcaccagcccctcaacactgccatccacctggctctgggccaagccaccaatccagagctccctcaggtcctgggactaaggcggggacatgactgatcccctcagagcaggctcaggcctggagtcggcccccaaaagtttcacatagggccaggcagcctctgtgtttctttccctggtcctgaactgtggaaatgccattaaactctctctataatgtaactgaaactgctggctgggcgcagtggctcccacctgtaatctcagcccttcccgaggctgaggtggaaggattgctcgaggccaggtgttcgagaccagcctgggcaacatagcaagaccctgtctctatttatattgaaaaataaaaataacaaaagaaaatgctgtggatgatcaaaaccagggtgggcaggacccggtgctcacagggacacacatggatggtccattcgctttattgggtgcgtgtagtgttgtcatgacatctcctaaggaactggggggcacgtttgacactcatgaggtcagaacaggtctggtgggcggggggggggggggtcccagggtggtgaatacccacagcacacccccccaccaaaagagaaaacggggagaggagcctggcaggccagactctgatccccatggtccacacagggaaacccccaacagcggcctcggcccaccgcggcagagccgaggggctggcaggcctggccacctcccattgcccgatcagcctgctttagggtgtcatctggcccctcttcacaactgacaactgtggatgggggtgaattttaaaaaaaggcggggggggggggttcaggagggtgagcggtgagttcacggggccacgagacaccacagctgagtggggaaagggctatatgtacaggaggggcagggcttggggcgggcaggggagcctgggcccctgggggacatcttcaataaataaataaatagctacaataataaataagggtgacgggctaagtcaggagcaggggtcttgtgcccgtggctggtaggggccgggtcaggcccgggtagttgggggaaggtggggaagacagggaagaggggaaagggagtgggatggctctcagcaggcgcagtcctggtgcggtggcacctgctggtcactgagctgtgggccctgcttggcgcctgtgaccgcagggtccgccgtgtccaacgactcggacatcttctcgcagatgacatccaccaggcgctcaaaggtctgcttgacgttaatgttgtccttggcgcttgcctcaaagaactcgaaccctgtggtcagagaaggcagggatgaggaccctggccacgccctatgccaactcccagagatgcttctctgaggaaagggaacacctggagattcccagtgccaagcaacttattgaaggtactgacaaatcccacagagaagaaacttattgaaggtactgacaaatcccacagagaagcaacatggaactgggtcagctttgcatttcctgctttttttttttttttttttttttgagacagggccttgctctgctgcccaggatggagtatggtggcgtgatcatagctcactgcagtctcgacctcctgggctcaagtgatcctccacccccacctctcaaattgctgggattataggtgtgagccagcgcacctggcctcctgcccttccttcctaaaattgtgtctcgttgtccttagggacctggcaagacatgccctgcagcgtccagcccagccccgtgcactggccctggaaggctctgacactcaaatccagctgtgacctccccctgctcacacaccctctgtgactccctattgccctccaaagagtcccagcctctcagcacatggttgaggccctctgtgatcggccacatttcctccagctgaccctcatgttccagtcttgtgaaattattaccaaaacacacaggacctttctcactgcaagcctttgcccaagctatttcctctgcctgaaagacccttcttcactacccaccactccaggaagcctggctcctctcatgtgctcctcccatccaggtccctccctctacctcaggggtccctcgaggcacccctagatgcctcttgagcccagcaacacccaacaaagcgttggacggtgagtgtcagaataaatccttaaactttctgcatggcaaactcctacacatccctcaggatccaactcaaatggctcctggatgaaggctagtttgcagaaagtgtgaattacctggctttagctgtaagaccttgggtgtgtgccctcccctctcttagtgtcctttttctagacttgtgggtctccagcccagctgggcactcaccaaggtggtcagctagctgccggccacgttctgatgacaccacccgctcatcctccatgtcacacttgtttcctaccagcagcacctgggcattgtcccatgagtaggtcttgatctgggtggacctataggaggcaccaatgggggcaggtcagggcttggaggatcccagctccaccctgacgggctgatgtggagcctgtgtccttgtccgaggaagaaagacccagaagcttgcccctccatcctccccaccatcctttcccccaatgtgccccgctttcaccccactccagcccccgactgacccattattgtttctgtgttttggggttttttttgagatagagtctgggtctgttgcccaggctggagtatctgcctgccttcgcttctcaaagtactggaattacaggcatgagccacccagcccagaaattttctttttttgagatagagtcttgctctgtcgcccaggctggagtgcagtggcgcgatctaggctcactgcaatctccgcctcccaggttgaagtgattctcctgcctcagcctcctaagtagctgggactataggcatgagccaccatgcctggtaattttttgtgcttttagtagagacagggtttcactatgttggccacgatggactcgaactcctgagctcaagatctacccacctcggcctcccaaggtgctgggattataggcatgagccactgtgcccaacccagaaatttttttttaaagttattacttctgagcagaaaattgaaatgtttacaatctctaacctatgccaactctccttttttttttgagacagagttttgctcttgttgcccaggctggagtgcaatggcaatcttggctcactgcaacctccacctcccgggttcgagcgattctcctgcctcaggctcccaagtagctgggattacaggtgtgcgccaccacgtctggctaatttttgcattcttagtagagatggggtttctccatcttggtcaggctggtctcgaactcccgacctcaggtgatccacctgcctcagcctcccaaagtgctgggattataggtgtgagccaccgtgcccggccatgccaactctccttatagtctctatattctccaccctacacttgcagatatttgtttctatatggttatagttttacttttccatctgaaatccttctctgacccctacgttttatttattattttttgaagaaagtttggctcagagacaatggccccagaatgagtgtggaaggccagaagcgatggctcacgcctgtaatcccagcactttgggaggccaaggtgggcagatcacttgagccaaggagttcaagaccagcctgggcaacatgaggaaaccccatctcaactaaaaatacaaaaaaattagccaggtgtggtggtatatgcctgtagtcccagctacttgggaggctgaggcaggaggatcacttgagcccaggaggtcgaggctgcagtgagccctgatcgtgccactgcactccagcctgggtgacagaataaaaccctctctcaaagaaaagaaaagaaaaaaaaagagcaagtggggtacactcaccagtcctgcactgcattgaaggattcctcgttggtgatgtcatacatgaggatgaagcccatagcgccccggtagtatgcggtggtgatggtccggtaccgctcttgccctgctgtgtcctagggaggaagagatgaaggtcagagaggacctgcacataaggccctcgaagaggaaatgagctctgatatcatccagttcagccccctgggagaagcaggagcttgcccaggggcacaaagtgtcaggaagagcaggttgggtcaccagtgctcagaatatatgagtgctccattattccacagagtcattcaccaaacgtactgtgccaggtgctgtggctcacacctgtaatcccagcactatgggaggctgaggtgggcaggtggcttgaacccaggagttccagaccagcctgagcaacatagcaagaccccatctctacaaaaagtacaaaaattaacagggtgtggtggctcacacctgtagtcccaactactcaggaggctcaggtgagagggttgcttgagcccaggaggcagaggttgcagtgaggtgagatcgcgccactgcagttcagcctgggtgacagagtgaaaccctgtctcaaaaaacaaacagggggtcgggtgtggtggtggctcacgcctgtaatcccagcactttgggaggccaaggcaggtggatcacctgaggtcaggagttcgagaccagcctggccaacatggtgaaactctgtctctactaaaaatacaaaaattagctcggcgtggtggcatgcacctgtaatcccagctactcaggaggctgaggcaggagaatcgcttgaactcaggagacagaggttgcagtgagccgagatcgcgccattgcactccaccctgggtgacaagagcgagactccgtctcaaaacaataacaacaaaaaaaaaaaaaaaaagaaagaaagaaagaaagaaagaaagaaaacagaggccaggcgtggtggctcatgcttgtaatcccagcaccttgggaggccaagacaggtggatcacttgtggtcaggagttcaagactagcctggccaacatggcgaaaccctatctctactaaaaatacaaaaaaaaattagctgggcttggtggtgagcccctgtaatcccagctactcaggaggctgaggcaggagaatcgcttgaacccgggaggcagaggtttcagtgagccaagattgcactactgcactccagcctgggtgacagagcaaaaactctgtctcaaaaaacaaacaaacaaataaacaaacatggactgggcactgatcttttccacaccctgaactggacactggggacacagttgttaacaagatgggcacttcccttgctaagtgacactcagtgtgggaaatagaaaataacggtataaatgtatcctatattggagagtgacaaggaccaaggagaaaaatcaagccagatgaagatggagagaatttaactgtaggtttaaaaattaaaggaagctgacacttgcctgtactcccagctacttgggaagctgaggcgggaggattgcttgagcccacgagttcaaatccagcctgggcaacagagtgagactctgtctcttaaaactaacaaggccaggtggggtggctcatgcctgtaatcttagcactttgagaggctgaggtgggaggatcgcttgagcccaggagttcaagaccagcctgggcagacatagcccgaccctgtctctacaaaaaagaaaaaaatcagcaggcgtggtggtagaagcccgtggtcctagctactcaggaggctcaggtggaagaatggtttgagcctgggaagtcgaggctgcagagagccgtgatcacgtaactgcattccagcctaggggacagagcaagaccaccctgtctcaaaaaacaaacaaaaaaagagaatggggaccaagatccagctgaaacctcatacatggaagaacttgaagatggggaaactgagggaccaggattaggtgcttatgggagaacacaggtgctgtttctgccccggtacacagtgggcaccttactgataaatgcccagtgtgtaagtgaatgactccagtcaggaaagagatagacgaggttggggctgcttttccaagtacgggaatccaaccgagccgggcgggagccctccagctgggacccacccagatctgcagcttgatcctcttgtcgttgcgatagatggtcttgaccttgaagtcgatgcccacggtgctgacgaaggcaggcgtgaacgagtcgtcagcatagcggaagaggaaggacgtcttgcccacgctgctgttgccgatgatgagaatcttgaacatgtagtcgaagttctgatccgaggactccttctgcccatagcgcgagtctgtggcggatgccatctggggataccgggtgtagcagagccgtgaggggggctctctccatcctcatgtgcccaagcccaggcagaagatggcaagggctccagaaaacggccggtgtatggaggacacccttatcccatcaggagccccagtattaattggtggtgcccccagcagagggcagcctgtgaccttgaaatcctgggcgtttcagaggaggggctcagagggttgccgatggggacaccccagcagcccccttcaaggggcaggtgccccaggtggggctgtaaccctaaacccagggctgagcccggagggggtgactgcggctggctccgccccccatcaatctttcatggtcctcagaacccggccgcgcggccccacgtgcaccgcgtgcatggtccctcgaggacgcgcatctgcagcccccgctccccgcaaacctccaggccggagagctccggccaaggccgctgcatcacatgatacaggaggggcatgcacacgctcacgtgcacacagcctcaaacacgctcatccgtacatacaggagtgtgtgaacgcactgaggtgcacaggacaaagacacagacacctgtttgcacaccgactcgcctatagaaatgtgcaaaccacccgtgcgcacaggcccctccacccatgcaggcgtgtgcacatcacccacacggacacggatccccgtgcttgtatgcacgggccatacctgcacaggcggtccacacgtctttctccacgcgcgtgcaacgctcacacacttaggcccagacccccacggcgtcacacgagcatatccaggtacacaagcaagggtgcacacagacccgctgacacaggcaggcgcgcacacgcgtgtgcacaccacgcgcacgcgcacgcaaaagcctcccgcgcgcacagcttcccgcaaggagctcggctcccctccccctccgccgcagagcaggggggttgggggggttagtggtgaggatcaggcaggagtggggcgcccgggccctacccattcccagcctcgcgaccgccgcatccttccccccattcaaccctagtcaacctcgtcccccacctccatcagcccatcagtcaaatgaaggttatgcaggtgctcggagcctgagcacacccggccgcccaggagctcaccttgccctgcaccgatgcaacggcgaccctagcggcggtgacttttttggcggtggcggtgacaggaccccggtgcgttgatgtggggctgcgcggcggcggcggcagcagcggctcaggcccctgcagtcctccgtgacgtcctgcaaagggaggggcggagcctcacatgtagataagtccgtgacgccatccggaggcggagccgcgcgtagagatgtggcccattgacgcacgcagagccagatggggcagggctcctgagcagattgacgtgcaaatggggcggggcctagcgtgtgcatccagtaggggcgggagcggcgcgggggccgactccgcctctcgtccgcctcctgtccgcctcggggaggcggggcccctcagcgttctctcactggcttaagctctcgagcgacgggcgaagtagccaatcagagattgtctacgccctcctcttgtccaatggtggcatctgggagattgaagggccgagaggctgaggccttggctgagccccggtcttcgaggggcggttcccttacccgcccgcacccaccccaggtaggggactcttgaggccaccgtctagtccaaggtgctgtgacccctgttaaatgcccctgactcccaattgcagaaaagaaaaatcgaggcccaagagatgttttataccctcacatatatggggttcaaaataaataccaaagaataaacaggagtcaagagggacccctgtcccattcccgaggcgtaagacccccccactgagggaggggctagtaaagactccacccctcccccgtttctgaggtttgaaaagaaagaagtagaggtcaagagagcctcccctccccaccattcccagaaaaggaggaaggggctgatggactctctgggaaccccctcccctccctgcgccccgtcatcaagaagaaaattcgaagaaaaggtttagcagggacagagaagcgacctgtcccggaaaccccttaaagcctgcggtaaatgccccgggaaacagggagggcacgagccgaagcctccagctcttcaaagctcggattcaaagacccgggggctgggagaccccctccctccatcctgggaaagcaaaactcagaggatggagccttttgggagctaagatggtccatcttttattcctccaaatctttagggaaggaagtcagaatttggggagggaggaggagcccgaaaccccagcccccactttgggtctcctgctccccctactccagctttcaaaccctccaggggtgtgtggcccccaggagagtcctgatcccctagattctccccccacccctcccagtaggcggggctggagcgtgtgtgtgtggcggggggtgactcgtcctgtttataaaaagctcgccagctgcggaggcgccgagagaccagaataacttagcgcctcgaggcccagccgccgccaacccagtccccagcccgcccccagtgccctgggagtactgggacgcccacccccacgtccccgcaccgtttacatttgggaaatttattttttctttttagggtaacatgtttgctccctcctcccccactcggactatagaagtatcaccaatccactgcagagaaattgggaaaattcagaaaaacaaaaaataaaaagaaatccacctcccattctccctgccctccgcgcccacgcggtagtccgtgctctgtggggggctccagggcagctggtccaggccctggcctgccgcctccttggaggggaggtttttcggttgctcagctccctgatcgcccaaaggcacgcttcctacatgggtggctctctcggaaatacctcctgccttttttccccaggaagagaaaagtgagccacgagaatgtgcggaagcttccgtcactgacttagtattttaaagtaaaaatagccgggtgcggaggcttacgcctgtaatcccaccactttgggagaccaaggcgggaggatcgcttgagcccaggaattggaaaccagcctgagtaacatagggaggccccatctctacaaaaaatttaaaaattagctggatgtggtgtcgcgtgcttgtggacccaaatactcccgaggctgaagtaggaggatcacttgagctcaggaggtcgaggctgtaggaaaccgtatcgcgccactacactccagcctggacgacagagtgagacgctgtctcaaaaaattaattacttaatttaaatttaaaaagaatgcaagcccttgattgtccagagcagcattgggctctggaattagaaatggttgagctgggggaggggctgcgggattggggtattttctttgtgtcaggggagacagagctggtgggagaacgggctaggcttccaggccggtcccactcagaggaaagtccagaggcttccctgcatccctaccctatcgtctacactagacaaataaaaataaaaatgtggccaggtgcggtggtttatgcctgtaataccagcactttgggaggccgagtcaggaggatcactccttgaccttgaggtcaggagttcgagaccagcctggccaacatggtgaaaccccatctctgctaaaaatacaaaaattagcccggtgtggtggtgcctgtcccaggaggctgctcaggaggcccaggcatgagaatcgcatgaaccagggaggcggaggttgcagtgagctgagatcaccggcaccactgcacgccagcctaggtgctagagggagactctgtctcaagaaaaaaaaaaaaaagtatcccagatacgggtccagggacgacttctcggggaagaagacactaacttaaaacccagtgtgggggccaggtgtggtggctcatgcctgtaatcccagcactttgggaggccgaggtgggtggatcacctgaggtcagaagttcaagaccagcgtggtcaacatggtgaaaccccatttctactaaatattagccgggcatggtggcggtcgcctgtaatccctgctacttgggaggctgaggcaggagaatcgcttgaacccgggaggcagaggttgcagtgagccaagatcacgccattgtcctccagcctgggcaacaagagcgaaactttgtctaaaacaaaaataaaaacaaaaatctaatgggtgaggctgggggctgagagagaagcattccaggtagtgggaacagcttgtttgaaggccctgtggtgggaccaggcttgcagtgtggccagagcagatgcagtcagtaagaggagagggacaaatgcctttggctcaaactgaaggagaacatatgaatattcatttataagaaatatgaatattctagggctgggtgcagtggctcatgcctgtaatcccagcactttgggaggccgaggcaggcggatcatgaggtcaggagttcaagaccagcctggccaacatggtgaaaacccagtctctactaaaaatacaaaaattagctgggcatggtggtgggcacctgtaatcccagctactcaggagactgaggcaggagaatcgtttgaacccaggaggcggaggttgcagttagccaagatcacaccattgcactcccgcctgggcgacaaggcgagacgcaaagaaagaaagaaagagaaagggaaaaggaaagaaaagaaagacagagaaagaaagaaaagaaaagaaagaaaaaaatatgaattttttttttttttttgagacagtctcgctctgtcacccaggctagagtgcagtggctcgatcttggctcactgcaagctccgcctcccgggttcaggccattctcctgcctcagcctcccgagtagctgggactacaggcgcctgcaaccacgcccggctaattttttgtatttttagtagagacggggtttcactgttagccaggacggtctcgatctcctgacctcgtgatccgcccgcctcggcctcccaaagtgctgggattacaggcgtgagccaccgcgcccagccaaaaatatgaatatcttataacagatggagaaaaactagagggaaataagtcaaaatactgcagataatccatgggtggagatacagcagaattttatttccttctttatacatttccattatttccaaattttttacagcgaacatggtattactttgtaagcggactggggggaaaaatcttgaaaaaaaaattccctaaatatcttctttttaaaagtctggaaggaaatgcaccaagttcgtgaacccggatgacttttagttctggcactgtggaattttatcattaactgtgatgatgatgaattctgagtggttataatatttatgaacgaagccagctgctctggaagccgagggcggctgtgatgacgcctgtatcttgtataaatattcaggcacgcgaagagggaggcagaggggagggatggatactgaggcttccggaggcggggatcgaaccctaggcttgagcatggtgctgcccagtccgctcggaggcccgaccagcaggacgagctcttcccggcgaggtgcggtaagtgggaccatcagggctggaggatgccacccctccgacccaccccccaacccccgacaagcgcgccccgccgtgtctcccacgcccgccaccagggggtgccgctggctaacattgggcgcccagatgcttgactttgagctggcaagaggacctctctgcgcctcagtttcctcatcagtgaaatggccaggacactcaatttggtcaatcgaatgtcttaagatgtaaagattttatttaaccccagataaatgctcagtaccccaaatgtctaagatatttcagggaggtcacagacaacaaccccccacacctcgtcggagtttatccaagtactaggatcaggttacagaggggaaactgaggcccagaagaggctatgatggcaagaaagcctcaggggcctccctccctctagggggagtctgaggcagtttcaggaatcaggagacttagagacctgctagagagggaaaattgtgtgtttttgttgctgtcctagggaaggaggaacacgtaggggacccagtatggagttctgcggacagagaaagcagggggctcctacatccagagacaccaaagacagaaaataaagcgacttaaagcaacaactggtgcataggttcaatcagtcttcagagacatgccgggcacagagccccctctttttattgttgttgtcgttgcccaggctggagtgcagtggcgcgacctcggctcaccacaacctccacctcccgggttcaagcgattctcctgcctcagcctctcaagtagctgggattacaggcacctgccaccatgcctggctaattttttttttttctttttgagacggagtcttgctctgtcacccaggctggagtgcaatggcacgatctcggctcactgcaagccccgcctcccggattcaagcgattctcctgcctcagcctcccgagtagctgggattcaggcacccaacaccatgcccagctaatttgtgtatttttagtagagatggggtttcaccgtgttggccaggctggtcttgaactcctgacctcgtgatccacccgcctcggcctcccaaagttctgggattacaggtgtgagccgccgcacccagcctctaattttttgtatttttagtagagacagggtttcactatgttggccaggctgattttgaactcctgatctcaggcgatccacccccactcagcctcccaaagtgctaggattacaggcgtgagccacctggcccggcttttttttttttcttttcttttttgagacagtgtcttgctctgtcgcccaggctggagtgcagtggcatgatgtcggctcactgcaacctccacctcctgaattcaagtgattctcctgcctcagcctccccagtagctgggattacaggcacccgccaccatgcccagccaatttttgtatttttagtagagatggggtttcaccatgttggccaggctggtctcgaactcctaacctcaggtgatccacctgcctcagcctcccaaagtgctgggattataggcatgggccactgtgctcggcctcagagccccgtctctttcctttccttctcttttctttttatttttagacaggatcttgctgtgttgcccaggctggagtgcagtgatgcagtcatagctctcttcagcctccaactcctgggctcaagcgatcccctttgtctcaaccttctgagtagctgggattctcaggtgcacaccaccatgcctggctaattttttttttcagagatggtgggggtcttgctatgttgcccaggctggtctcaaactcctgagcttaagcagtcctcccacctcagcctcccaaagtaccgggattacaggcataagccactatgccttgcccagcccttcttttctgctcctcttcctgccccctaccgtagtttcagaaacaaaactgggtatgagtgaagctttggtgctgaaaattttccccactcacatttccatgctcttgcagagagccgcttggtagaggaagacagggagatgcctttgggatggtctcctgactccccaccctttgtgcagggctactacagaggcagaaagctggcacgaagtagatgagcaataaatatttgataaagaaggaaataattaagtgacagatgtgactcaagagtgaccactggagagggtggactagaggctccagcagacagcacctctcctcacagggatagaagcccaggagaaagacaccagggcatcgtaagaggctgccccttagagagctcttttaggcaagtctagggtcagagtggaccccagccaggtgcctccaattagaccctgggagccacctataactaagagcttgattgtctccctaaatgggtgggaaagtgaagcaggagccacatggagcctcttcctggaaagtctgcctgccaagagccaaagggctttaccatccattgcccctgcagttcacgcagggctggccctaagtcctctggttgtcgaggggtaagtccccagggtctgggccggcttcaggggacaggagttcagtgtcaggcaactccaaggcctctttggctaaagctgtctcttccccctcctcttcttcctcctcatcctcttcctctgcctcctccagagtcagttcaaactggaatctgtcaggcccgtcccgctcggggttggtgaggtctgagggacttcgggggatcttgctctggtaccactctcgattgtcctccagcgtgtccagcaggtcctgtgcatctgggtggaccaggtcagcccaagtctcccacagtgggtgagcaatgtagtcaatgaaacccacctgtggcggggggtggggcatgtcggcatttggtgagttacagtgaaccctagactcaatccagcctccagatctttagccaagttgttccctctgcctggaatgccgcttcccaacaactgctcatccttcaaaacccttttcaaataactcattctctagaatgcctcccttaacccttctggcctcctccaaccccaaccctaaccccacagggctgaatgtacgtgtcccccagactggaagcccctccagggtcccgcatgtcacctagaacagatgtttccaaaccccagaagtgcatgtccctctccctgaagcccagagagaatggatcccaggtctaactcggcccagacagcacccttcaggcacactccctggctagccagccagggccaaaccagggctcgtggggttggctcagcccctccttttacttcctcccagtgtctaccggttcagcccagtcccctgccaacctgggacttctccactgaggccgtatgcttgtcacacatgggactgatgtccaggcccgactcacgctcgcggtctccctgctggaagaactcggccatgatgcggtccgtccactggcggtacaggggcagcggcttggtggggttgctcagatcagcacagtgcaccaggttctgcaagacctacagagatcgaggcttgggagggcactggcggggcccagccacacctagacctggcacctccacagacaggcttggtgccatggacacattcatcttacaggtggggaaactgaggcctgagacctgaagaaatggttaaggcacaggcatgtgactcttgccatttcttcaagtttggcatccagtcggcacttcataaatgaagctaaatgagaattgcaaaaatggaggccctctccgatttttttttttttaatgagttagggtctcacgctgtgaccctggctggagtgcagtggcaagatcttggctcactgcaacctctgcctcccaggctcaaatgatcctcccagcccagcctcccgagtaactggaactataggcatgcgccaccatgcctggctaatttttgtatttttgtagagacggggtgttgcccaggctggtctcaaactcctgagctcaagcgatccacccatctcagcctctcaaagtgctgggattacaggtgtgagccactgagcccagctttttttttttttttttaagagacagggtctcactcagttgcccaggctggagtgcaatggtgcaatcacagctcactgcagcctctaactcctggcctcaagcaatcctcacaccttggcctcccaaagtgctgggattacaggcatgagccactgcgcccagccttcactctaaatgtgtaagaaacctggctaaaattgtttttgtttgtttgttttggcttgtttttttgagatggagtcttgctttgtcacccaggctggagtgcagtggggtgatttcggctcactgcaacctctacctcccaggttcaagcaattctctgcctcagcctcccgagtagctgagattacaggcgcccgccaccacacccagctaatttttgtatttttagtagagatggggtttcaccatcttggccagactggtcttgaactcctgacctcatgatctgcctgcctcggcctcccaaagtgctgggattataggcgtgagccactgcgcccggctgctaaagttgtttttaaagtaaaaccggccgggcgcggtggctcacgcctgtaatcccagcactttgggaggccgaggtgggcggatctcaatctcatggagattgagaccatggtgaaaccccgtctctactaaaaatacaaaaaaaattagctgggcgcggtgccgggcacctgtaatcccagctactcgggaggctgaggcaggagaatggcgtgaacctgggaggcagagcttgcactgagccaagatggcgccactgcactccagcctgggcgacagagtgagactccgtctcaataaataaataaatacataaataaataaataaagtaaaaccaaaatttaaaaaggaagccccagtgcccatccagctacacacctggattcggtcggaatagttgtccaggaggaggacaccgaggcttgtcaccttcttggtctccaccatggtcttgaggtcggccaggaggttcatgtgtttggacatgtctgtggccagcacctgggggcaggcaagggaaggtgacaggcgcgaggaccctgcccaccccaaccctcactcccaactcccagatgccactctggctcagactcagccctctgggcctcagcatactcatctgtgaaatggaaggatgcaactgcattcactgcaaactctgctcaaaagaggggctcagtcaggggccccttttgggaggtcatctgggttggccatgaattccacatgtgtgacagggtgtagtggggaggtgatcaaatctgtgcgcctgggacttgtcagacagagtctcccacagtgggtgggcattgtagtcaatgaaacccacctgtggggtgggtggggcggaaggcattcgttgagtcacagcaaaccctagaaccaatccagcctccagatctttagccacgttgttccctctgcctggaatgccgcttcccaactcctactcatccttcaaagcccttttcaaataacccaccctcaggctgggcgccgtggctcacgcctgtaatcccagcactttgggaggccgaggcaggtggatcacgaggtcaggagatcgagaccatcctggctaacatggtgaaaccccgtctctactaaaaatacaaaaagttagcctggcatggtggtgggcaccggtagtcccagctactcggaaggctgaggcaggagaatggcatgaacccaagaggcggagcttgcagggagccgagatcctgcaacagatctgggcgacagagcaagactccgtctcaaaaaaaaaaaaaaaataacccatcctctaggatgcctctgttgacccttctggcctcctccaaccccaactgtgaccccacagggctggttaggggctagggtgacttgtgcctgaggacagtggggaggatgagttctgtgcaaaggggctggaagagttgggtacatgggagggaactaaaagaggtggctgtggctggaagaagtgagctcaagagaaagggaggtgagattgaagagactgagggcctctggcagctggggtagattgtccagaggctatgggagccacaggggagtttgcagctcactgtggggagggatgtgacttcatacccctcaaacttccatgtagccaccatgtgccctggagggctatttctaggcacagatgtttaaaaaccagattaacccagccgggcgccgtggctcacacctgtaatcccaacactttgggaggcagaggtgggtggattaccagaggtcagaagttcaagaccagcatggccaacatggtgaaaccccgtctccactaaaaatacaaaaaattagccgggtgtggtggcaggcacctgtaatcccagctactcagaggctgaggcaggagaatcacttgaacccaggaggtggaggttgcagtgagccaggatcacaccattgcactccagcctgagtgacagagcaagactccatttcaaaaaaaaaaaaaaaaaaaacttaacccacccatgtggactcagcccagccaggagtgactcagatgtggttcaccggcttctctgagagtcagacaaaagtctcaaaacttctcctcaaatctctcatctgtcccaaatgctgtctccccaccctgtgggtacccaccactcaagaccccaactccacctcaccaaacgtttagttctttctcactccaagccttggctttctctaagccctcctcacgtggggttccctctgctgagaacacagccttcctcattctgcacaccctggcttcaatgttccctctccaagaagccctttctgacctctttggctggtctgggctccgaaagcaccttgaaccttcctcctcacagctctgcctgcaggtccctagtcaagggttagaatttcataacggccggaactgtctttgcacagatcaagcacacaataggtgctcaataaatgcttgttaagtgaatgaatgaggcatgagaccccaaaacttactgatgtgcccctacctaaaaaaaaaaaaaattcaaatggatagatgtgtataatttttttttttgagacagagtcttgctctgttgccaggctggaatgcagtgtgcgatctccgctcactgcaatctccgcctcccgggttcaaatgattctcctgactcagcctcccgagtagctgagactacaggtgcatgccaccacacccagctaatttttgtatttttagtagagacagggtttcaccatgttggccaggatggtcttgatctcttgacctcatgatccgcctgcctcggcctcccaaactgttgggactacaggcctgagccaccgtgcctggctgcttaatttttttcttttcttttttttttttttttgagacagagtctcactctgttgctgaggctagagtgccgtggtgcaatctccgctcactgccacctccacctcccgggttcaagcgattctcctgcctcagcctcccaagtatctgggatcacaggtgcccgccaccaggcccggctaatttttgtatttttagtaaaaacaggggtttcaccatgttgatcaagctggtctcgaactcttgacctcaagtgatccacccgcctcagcctcccaaagtgctgggattacaggcgtgagccaccacgcctggcccagatgtgcttaatttaaggcttagcaaaagttgcacctgacaccccagaaacggtttccacattgcctgggtacagccaggatctgctgggcccagcagagggcctggggtttgggcagtcactagcccctttttttttttttttgagatggagtctcactctgttgctgagactggagtgcagtggtgcgatctcagctcactagctcactagctcactacagcctccgcctcctgggttctagcaattctcctgcctcagtctcccaagtagctgggatgacaggtgcacaccaccacacccagctaatttttgtatttttagtagagacgaggtttcaccatgttggtcaggctggtctcgaactcctgacctcaggtgattcgcccgcctctgcttcccaaagtgttaggattacaggcatgagccaccgcccctggccccactgttccatttcacagatgaggaagctcagacagagtgaggacatgcctgggtctggatgaaccgccggccatgccaatatcaccccaccctgctgtctgcagatgagaaggatgccccgctcccctctgcccctcccgccccgcttactgccctggcctcaccatgtcaatgaccatcctgcgcagactcagtcgctgcttggcgctgaggttctggaagatatcgcagttctctgcctgcagcagcttgaagcccacagccaggtgatggttctccagcaccgaggcgtcgttgtacataagcgccagctctgagtctgtgagggtatgggactgagagccccaagatccacccgccccacccactctacccaaaagcagcttttggaaatccttagcaaactcctacccatgcgttgaaggcccaactctagcatgccctcctgtaagaaaccatccaggtccctggcgcttccctgactgcagggctagggttgtctgtgtttggctctgcctacccaagactgggaaggctcctcatggaccccctatggccagtgacagtgagtactcagtaatgttttttttttttctttttcttttttagagacagggtcttgctgtcacccaggctggagtgcagtggtgcaatcacggttccctgcagcctcaacctcctggcctcaagtgatcctcccatctcagcctcctgagtagttgggattacaggtgtgtgccaccacccttgactaatttttgttatttttttgagagacagggtctcactgtattgcccaggctggtctcgaactcctggcttcaagcaatcctcccacttcggcctcccacaatgttgggattacaggtgtgagccatggcacccagtctctggactctaggtccttttgagtgaggggcctccactctcacccccagcactccagggcttgtacacaaaaggtgcccaataattgcctgtcaactgagtttttcagattcctcataggatcctaaactttaagatcttggtggaactgtctgggcgcggtggctcgtgcctgtaatcccagcactttgggaggctgaggcagacagatcgcttgaggccaggagtttgagaccagcctgggtaacagagcgaaaccctgtctctacgaaaaatacaaaaattagccaggcatggtagtgtgtgcctgtaatcccagctactcgggaggctgaggctagacaatcgcttgaacctgggaggtagaggttgcagtgagccgaaatcgcgccactgcactccagcctgggtgacagagcaagacactgtctttaaaaataaataaataaaggtcttggtggaaccagatcagctctgccacagctcattattctgtcatttgttggcacctactgtgtacccagacctgctccaagaccctgaagggagggaaaactgtcatagtcatttcatagacagggagactgggctcagggcagatgggaaccccctgagatcacctggtggacagggtggaggcagggtccacctcttctcctgcacccacttcccactcctacttactggtgttaatcagaaactggttggagaccccaggatggtccacgtcgtggatggcgcttgcaaagagggcagccaggatttccaagtctgtgaacacagcctgagcaggcagagggcacaggcggtgaggggcgggttctctgggccctgcacccgcccacctgcctgcagtcatggcgcagtacctcgagggcgggcgtagccagcagcacatgcgtggactgggccacgtcggcggcatgtaggctgttgtggtaggccacattggcgtggtagtgaccttccagcatcagcaggtaggtggccagtgtgtctgctgggatctggaatgtcttcagcaggtcccgctcctggtccatcacagaccctggctcagggccttggccttggggctgcagcacacgctgttcctacccctctcttctgaactcctatctatgcctcaagcacctgctcctctgagatgccctctgtgctctcctgaactcctccactctgtgttatttggtggtccatccctgaccctacaggactgggggtgtctctgtccagctcttctctccagatttctctcctcttcagggccaggggccgggccagggctgaggcttctggacaacaaactgttcatctgagtgaactcctattcatccttcaataccctgctcaaattatccccttcagaaatgtcagggaggatttgaaaaatgagtgtccctgaggtctgtggtaggaagcagtgagggaaaccccaggagtttttccttggaagccaagggcagggtaggtacctgaaaaatgctgaatatgatagctgtgaggggccggttcccacttagctccgccaccttgaacacatcaagtccccacttgttggtgtcttctagctcctaagatatgaagggctgaagcttaattaaccccagcccaacttccccagactctagagcctccatcctcccaccccaggttccacagtgagccccaactgcccagtatataggtgggcaaacaggcccgagatagggcatccagacagagccagggaccaaaccttgatcttggcattgtggttggggacccaccttggccagttgctcctcctggtcagtctggaccccaaagcgtgggacagtggctgaggagaggctggcactgtggcagagcccatgtaggccactgatccgggacatgggctgtggggcctcctcagcggtcaccttgggcagctccacctcggtctgctggtctgcggatgggccagggtgaagctcagagaagccgatttcacctgctggggcctggcctcaggacctgaattttgccaaaccccagaatcaacctatttccctttctacaggaaccaaagtaagttcggagtaaagaccctgtcggccggacgcagtggctcacgcctgtaatcccagtgctttgggaggtcgaggtgggcagatcacttgaggtcaggagttcgagaccagtctgagcaatacggtgaaaccccatcgctactaaaaatacaaaaattagtcacgtatggtggcaggcacctgtaaccccagctactcaggaggctgaggtgggagaattgcttgaacccaggaggcggaggttgcagtggctgagattgcaccactgcactcccgcctaggcaacaaagtgaaactctgtatcaaaaaaaaaaaaaagatcctgtcttgcctgtagctacctacccctctcctctgttcacagctgatctcagtaaacccttctgctaggcttggcccctgggtgcctggggctcagcattttcccccaaacagcctaatgtcctttccgtctcccaagctagtgtctggttccctccatctcctcctaggcaaatttctactcatgcttcaaaaccgtagctttaatgtcccctgctcctggaagttccccttgttcctccctctgatccagccctgactcatgggggctgaaggtgtctgtgtctggctgtatctcccccagactgaggtctatcataggaatctttcttttgtttcttagtactcctaaaatgtcgtccaggcagtgactcaacaaagctcacccaggaaggtccgggagatgtactcggacacctggttcccggagcggctggtttcggacaggtgggtcaactcccggttcaggatccgcttgaactggggcggagagaaggtgaagaccgtgatgatggggcaccgtgggccgaggcaggtgagctcagcgatctgccccacctcaccttgttggaggccatctcccccaccgagtgccgggtctgcagcgtctccaactgatccaggcaccagtccagctcgtctagcgtctccaatgccagcttctgccccgtgtcctctgggagccgaggcagtcaggggcctgcccaacccccccgctcagggaccccacgcctctcgcgacttcgtctcttcatctggaccctgaaactgttcccacgggggccacccaggactcctggacccaagttccagatctgttccccgagtgcctgtgtgaccatgagatctctgggcctcagcctcctcatctgtaatatgagtgtggtggggtccatccccgagggcgttattgtttttgcaggggcggggctacaattagccccagtataaggggctcatggactggggaggtcactatggaaaggaagctcccagctgtcctcagcgggggagggaaggaacaggtactttacctgcaggagggagctgattgctggatgaagggtttccgacgggtccctgcctgcggtacagcagcctcaggcgtggctgctccgcccatctcgccccgcccccaagtccaccaggccccgcccctcaaacccacctggaggcgccggagccccagcctcaatttgcagcccgctttccgcccaccttgtctctgccggccccgcccccgccccgccccgccctctacctacttggctgctcctaggcattgctggcgggcaagggccgccacgttgctccgaacggtccgcagactggccaggacctgttgggaggaggtggtaggcggtgggaaggagaggccggatccggagggggtcagggcagggagggcgggggacacccacctgggcaaagggcgtcacaatcatgtcctctccatgtctgcgaggagacgggccatcagggagagctctctcccatcttccagctttttacccacaccatatgccctcaactgagggggtcctgctctcaggacttctcctccaggctccttcttagtccctggggtcccctcatgcgactctccctgagacccagcacagcccctccaaccattcactcactttatcggcatctcataaatggggaaactgagtcctaggggtacgtagatatttcccttttcattatgcctactaggaagctcaaatcaaagtatttcttcatttgctgctaattggccttaatggtttgtttgtttgtttgtttgtttgtttgttttctgaggcagactcttgctctttcgcccaggctggagtgcagtggtgccatctcggctcactacaacctccgcctcctgggttcaagcgattctcgtgcctcagcctcctgagtagctgggactacaggcgcgcgccaccacacctggctaatttttgtattttttagtagtgacagggtttcaccatgttggccaggctggtcctgaacacctgacctcaggtgatccgcccacctcggcctcccaaagtgttgagattacaggcgtgagccaccgtgcccggccgaccttaatgtttttggattaccacccctactccagcaaaaggccaagttctctacacacttgattgaatatatgagctgtctggcaaactcctacttaaacttcaaaaccttccttaaatggctatttgaaggagcttgctgaatagaggaacaaaggaaggagggagggtagaggcggtgtcatcccaccagccccagactcacaggtcgctggccacagaggagttccgagacatggccttgggcgagagttcatagtcgctatctgagcggtacaggaaggactcgcgccgctggctgtgcgggactggagcctgcataatccggcccaggccagggctggactgagggtccagggccctcctcccacacgagagcccattttccaggtcaaagctgaaaggagagacggcatggtcagagacgagggtcatgacaactgggtgccgggtcgtggccaccttgtctggtgcgtcctccctggggctgcttggcagtcaggcaagtgtggtttccagcttgttcacctgcccccagctacaccctcaggaaccctgcacccctcacactttggtctttgagtctacactggactccaggacctcagttccagatcttcctcaaagtggctatgtggccatggacaggtactgactttctctggacctcaatcaccctatttcttttattttttttctctctttcttttttttttttctttctcgttctttctctctctctctctctctctctctctctcgccctttcttttctttttttttttttttttttgacagggccccactttgtcacccaggctgcagtgcagtggtgtgatcctacctcactgcagcctcaatctcctaagctcaagccatcctccagcctcagcctcctgagtagctgagactacaggagcatgccccaacactcggctaattttaaaattttttgtagagaccaggtctcactattttgcccaggctggtcttgaactcctggcctcaaacaatcctcccagctccgcctcccaaagtgctgggattacaggagtgagccaccgcacccggcctccccatttcttttttttctgttttttggggtttttttgagacgaaatattgctctgttgcctgcactggagtgcagttatccatgctggagtgcagtgggggaacgatctcggctcactgcaacctccacctcccgggttcaagcaattttctcgcctcagcctcccaagtagctgggattacaggtgcgcaccaccacgcccggctaattttttttttttttttttgagacagagtttcactcttgttgcccaagctggagtgcaatggcacaatctcagctcaccgcaacctccgcctcccaggttcaagcaattctcctgcctcagcctcccaaggagctgggattacaggcgtgtgccaccacgcccagctaattttgtatttttagtagagacggggtttctccatgttggtcaggctggtcttgaactcccgacctcaggtgatccgcccgccttggcctcccaaagtgctgggattacaggcgtgagccaccgtgcccggccaaagttttgtatttttactagagacagggtttcaccgtgttggccaggctgctcttgaactcctgacctcgtgatctgcccgcctcggcctaccaaagtactgggattacaggcatgagccaccgcacccggcctctcctgtttctaacatgtgcgtgatgtagcccatccccgagagctctttgagggggttacaaccgaacatccaaagactgcgactggatgaccatattgcaaagggacaaactgagatctagctcacatggtggacacgtggactggaaacagcttcttgggctcttctacctggaggaggccggggttctgcctagctcctgcgtgcgccttagtctagagagaccccactcctagccaacttgctcacacccttggctacctgccacgcccccagcgttccaggctccaccctcagcccataaggctccgccccacggccgccgaccacgcccccagctagccgggtcctgccctaggctcccccactcctccacttcatcttcagcctgaacgttccgcctgttatcttccacctccgggtctttgcacaggccgtgctttctgcccggcccaccctcctccctctccacactacctgtcccgttctaccctcaaaccctgtctttccctctggctcctcctctttggggtcagaggtcagagaaagggcgtagggcaagaactggggcgctagagaaggcggtgacctgggggtgggttttcaagaagggcaggcggaagcggcaccgacaggaagacaaccgggaccgcctgagactcggagctcccggccgagggccagtgtccggctggtcccggccaagacttttgggtcaaaggtcaccgtatccccgtccacgagctgggtcggcaccccgcgtaggctcagatctgggtagaggtgggggatttggcagcattcggtccaagtatgaccgggtctgagttgggtctgatcacgtcgaattggacttggtcacgaagagtttgttcgatgagttcgggagaattcggctacgtccgattgagctcgggagacttcggataagttcgagcttgttcgcctaagtccggttacgctcggtctgcttcgaacaagtccgggtgacgctcgggccgggtcgggcatgttcggtcacgtccggctacatgagggctagttcgggcatctccgactaagaccggccgcgctcggcctgttccgtccgactccagcgggtttagcagcaccgggatgaaccccacggccagccgaaggggcggggcttcttaacccttccctggcccgtctggggtgcgccgtgggcgctgtggtgcaatgggagacgctcttaggggcggactggaggcggcggataacccagatctgcccctcgagggggaggcatgcggatcgcgaccccctacccctctctcggctctccccaagggttccagaaaagcgcgtctgtggacaaatagggaaactgaggccaggagcggccacagggcgtgcaaatccggatcccgggcgcggagggttaaggactgggcccgggttttcttggggcgggggaggctgtttttctttctgctctaaacttagccgggagcggcggggtcaggctgtggttccatgacgcgggcggtgcgggggtagagccccccggctgtgggaacggcgcggctgcccattggccaggggggtaaactgagccagggaggctcggacttgggttcgggtctggcctgcgcggggccggccctcgttcatcctcacttctgagtacccgcgacgcgccctcgacgtccctgcgctgtctctagcgccttcaaaagggaatgtgcttcgctagtgtttggtgccccgaggtcgctctccaggacacggaacccccactctcccactccctggttgaaatggaaccaccaggaaccacggtcataccttctccctccaaccccagctatgaccttggagagggacctcccctctcagcctttgggtgccagacttaccaagtgggtgccaattcggcgcggaccaagcgcaggatgccagccacagtcggcgcccacaagccccactccgaaccccagccttgcccccatccctccccacgaggtcacagtcgtttctggaaaggcagggattcgaacccagaggggtggaccgagtgcttagaggatgcagcgcaagcagctgccgggcgcaggcgcgcgctcagcctgggactcccgaacgccctgcctcgaaaaccccctcaattcaggtcttcctccgtggacacccagagttcattgtgaggcccccagggcatctctttgctggcactgggacaggatgctggtgggagggggcaccaagggaaggagtgccccttccccctcctcccactgccaggacgcacagcctgcctgccccaggccggcgagggtcaggaggagacgtgagcctcagcccgtcccactctgggcctcacagctggaaggagacagacggctggtcccctgggcctatatccaggcggcgggtggagacagacggagacagagagagacagagtcaccaactgcgagacaaaagtagggtaaggtagggtagagggagagagatacagagaaagcgagggagaggcagagcgtccaagcccggactccggccccggccccagctgtccctggccttgtccctgtccctgcccttcccacctccacaccgggcgtcccggtgaccccgccaggccctctgtccagcctcaccacagcggatgggccaccgtgaagcgccgctgcaggcggatgctctgattcaccaaaagcttcctgaagagcccgggggagccgcgcggggatccccgaggggagccgggcccggggaccggggcgggcgcgggggggccctgcatcgccaggactgcgtggaggctggaccgagcgccggctgcgcgggaccttttctggacagctgcgggggcggggcccagcggggagggggcaaagggcgcatcggccccgcctcgaggccggcggctccctgacgacccccgggacaaacggggaaactgaggcacagagtcagacgcaactctctgctccttttttttttttttttttttgagacgatctcgctgtgttgcccaggctggagtgcagtggcacagtcctagctcattgcagcctcaacttcctgggctcaagggatcctcctacctcagcctcccaagtagctgggactacagatgcacaccaccacgcccgggctaatgtattttctggagagatgggggtgtctctttatgttgcccaggctgatctcgaactcccagactcaagtgatcctcctgcctcagcctcgcaaagtgctgggattataggtgtgagccattgcgccaggcccaactgtacttctttagagggctgcccctaagatctcagagcctggatcttactcagccttcctcggcacgtccctggttagtgcagcttgctgggccaataactgctaaaaagtgtagaatgagggagtcagaaagcaaggtgcccagagaaacagctgtcttgccttccattattgagggcatcaccgaggtatagagtttgccaatgtccgatcccacgcaatgtttctaatcctcctctgcccattttccagatggagaaactgaggcctagtgccatcaaacagcgcaccagaaactacaaacccttaatcctttgccaagtggggaaactgaggcttccatggacgcggtcacgggcatgggtctttgttgcagaaagcgagacccaaactcagggccccctctcccagcacccctccacgcaactccccacgtgatcccccacctgctctgacattccccaggccctgtctctggatgccttcacctctcctgctgtctcctcctagacaaacatccgcacatcacctctgccaagtcttctgtcctgcgaaacctcagccgcccacccctgccatcagagggacctcactgtcccaggactggggggggcctctggtgtctgggaggattcccagagtctgtaccaggtgctctaccctcagaatgctggagtcaggctggccttgttccactttacagaaaaggaaaccaaggcttagcatgtgtcacacaaggaggagggacctagaaacagccatgtcacaggcagaggcccaggggacctcccagcaactgaggcctgaccgtgccccttgctgtggaatgacctctgtctctcagcctgggccttccccccggggcggctgcctcagtcttggtgtccccagacatggtacccatgtttctggcagtcctggagaagcccattgatcagggatcccacaggagatcctgaggcaaccatgctaaggccagatacatgagagtctccccattctacagatgagaaaacagaggctcagaggaggagtcacacagcccagaaaaacagagagcctcaggtatctggccaggaagcccccctaacccccgcagtcttgcaaccagacacctggcgggaaccagacctcgctgtccccaagacaaaaataccatcgttgtctgctggggccagacctaattatagccatccctaggggacacatgctgctaggattggccttgtggggacactggagccaaggtctcagcagtcttgacaccacctccccgccactgtgagagaagtgacaatagttacatgtccccaaggagaaaccgaggcacagagattcagcccctcccccaaaatcacagacataaaataggaggctaagactaaacaaaattatgtaaactgagtgcttcaaaaacatgcagcactcagccaacagcagtgaagggaaaagtcattggattttcagacgaaacctacaaagtgtggactactattcccatttcgaggatggggctactgaggcacagaaaggcacagtcatttgcctaaggacacacagccataaggtgcaagactggggtcatttgaacccggacaggtagtgttcttcccagcctgggtcctcccgcactggatgcgttaactcatttcatcccctctgtagtcccaggggcgagtctcacattaatattttatcaataggtttactattaatgtttcatccatatatttaattttaaatattttattaacagttctaacaggaaggtgttaattaatagctgttcggatggagaaagagtcacagcaaggggtggccacagagccaggactcagcattcacagcctggctcctaccaggccctgggaggctctccaagccccgctgggtaagggacaaaagctgaaagaggtttggacagaagcacccctaccctgactccatccctgcattactgcatctcctgtagaggtgcccagtagtctctggtgcctttatttattttattttattttatttacatattattattattttttgagaacagagttttgctcctgttgcccaggctggagtgcaatggcacaatctcggctcactgaaacctccgcttcctgggttcaagcaattctcctgcctcagcctcccaagtagctgggattacaggcatgtgccaccatgccaagctaatttttttttttttttttttttgtatttagtagagacgaggtttcactatattggtcaggctggtctcgaactcctgacttcaggtgatcacctgcctcagcctcccaaagtgctgggattacaggcgtgagccactgtccctggccttacttttttgagacacagtttcactctgtcgcccagggtggagtgcagtggcgcaatcttggctcactgcaacctctgcctcctgggttcaagtgattctcctgcctcaacctcccaagtagctgggattacaggcatctgccaccacgcccaactaattttggtatttttagtagagacggggtttcaccatgttggccaggctggtcttgaactcctgacctcaggtgatccgtctgcctcagtctcccaaagtactgggattacaggtgtgagccactgcgcccattctgatgcctttagcacagcactgcctcagtttccctcatttgaatgttcccttctctgggcaggcacttttctccactgccaccaggtggccccagagagatttttttaaatgggtgtttttgaccattttacagatgagtaaactgagacgtggagaggggagatgacttgcccaagtccccacggaggagtcaagcagaatgagcagggtgggggccaggtcacatgtgtagatgttcgcatgggtcaaatcacacactcctttgctgcagaccctcccatggccccccattgccctcagatctgaattcacacctcccagaggtcccatgtggcccatccccacctcacttctcttggcttacactgttccagtctctccccactcctcactgttctctgaatcagccaggcttatttccaccccatggccctcacctgaatgcttgtcgcctgctgatgctttgtcttttgggttacagttagagtcacctcctccgagaagccctccctgactagccaggtaaatgcctcagagcaccctccagccatggatacaacttcacatttattgtcatgattatttgcctgtgagtccctggagagcaaggccaggtctgccatgttccctgctgttccctcagtacttggcacttagtagatgctcaataaatgcttgtagcggctgggtgtggtggctcatgcctgcaatcccagcactctgggaggccacggtatgtggatcacttgaggtcaagagtttgagaccagtctggccaacatggcaaaactgtctctactaaaaatacaaatattagccaggcatggtggtgggcacctgtaatcccagctactggggaggctgaggtaggggaatcgcttgaacccaggaggcagaggttgcagtgagacaagattgtgccactgcacccggcctgggcaacagagtgagagactccatctaaaaaataataaataaataaatgcttgtagcataaacagagagcctctccttccatcctcaagccacactgatccattttcagctcctcacatgcctgatcctcttgagtctgaggctttgcacattctgttccttctacttagaatacccttcttgcactcaccctagctgacctctttcctcctgcaggctaagcttaaatgtcacttctcccaagcagtcctccctgactcccaccccactgctgggtctggagcctcctctgggcttgttctctgacctttccctatcaacctgtgccttctccacctggtatgagtgtctccaccatcagccttaggggacacagcttcttatccatggttgcgtctccaacacagggcctgccacccagtaggtgcttaaatgccttctcaacaaaatgcttagaccctcccatacccctgtgatccatctggggctgtggggaagcacattcccccaacagtttctagggctgagtaaagagccacaagctggggacccagtgtgtaccaggctcaggcacagaatattcacctctctgatgaggacgccgaggctccgggaggcaccacggcttgctcaataccacacagcaggttggccttggggcctggccttgaactcagtttcgctgggcttccccctggggtgaacccctaccctcatatcagcacagagaagcacagtgggccacatgcatgctcatccacgtatgtgtgactgcagcgcatacgatgcgcagaacgacgtgtgtgtgcacacacacgtgcacagggacacccaatccaccgctcctgcctcccagagccaagcgggggcttcccctagaagagctcataccaaggctctgtttgttctttcttgaaaatggaaaatcatgagtcaccagaagggatggggaaggaggaactagaagccggggcgggagaaggggctcctgggtcacctgagaacagctccaacccctctgggctgtgggaaccatctaccccagatgcctcccaggctgctggagggccaggctgggggcgagaggccaggcttgctgatggagtcagaagccagtggcccctagggggtccatgcaccaggacgcaagaaagccaagctccagagcagggaagtaacccatccaaggccactcagcctggactgaaatctgggatgctggtccagctgacttggttctccctccaacctaaggagggcttggagttcctggaccctccttcctggccctggagcctccacctggtagttggagaccctcatgtagggccccctgaggattctacattatctttctatgagtctcttctgtctctgtcctaaccccaccccactcaacttacacgaaacaggagaagcagcccctccttacttaagtgaaagaaacttcctgtgcacgagcttcccaagggacttcccttcctcctacaggggagcagggtggggtgagggagtgggggcgggggaggtagcaagagaagactcctccccccaacactggaggcagcctgccctggcccttatatatctataatatattaaataggccaggtgctgtggctcacacatgtaatcctagtactttgagagactaaggcgggaggattacttgaggccaagagttcaagaccagcctgggtaacatggcaaaaccccgtctctagcaaaaatacaaaaattagccaggccttgtgatatgcccctgtagtcccagctactcgagactgaggtgggaggatcgcttgagcctgggaggcagaggatgcagtgagccatgatcgagacactgcacttgtacctgggcaacagaatgagactctgtctcaaaaataaaaacgtgtgtgtgtgtgtgtgtgtgtgtgtgtgtgtgtgcgtgtgtgtgtgtatttatatccaagcaccccagggttacctcgggtgcttgagctggtcacaaacttcccccacaggcctgcggacattccacaaccccgaaaaccttcggacccccagctatgttagcacaaggacagtcacactcagccacatacctacaggcaccacaaggggagacacacaggcacacccacaactacctgggacacatggaatcatacccaagcatgaacgtacaggagcaccccaaacacatctggtcaccccagtctcacgcgcgcgcgcgcacacacacacacactctttcagtcccaaccgcacgtgggcacacccggtcacacagacccacaagccatgatgacaccagcaccctcagctccacccctacgtagaaatagctttttccttccaggcgccagcctcaaccaagcagcagagacccccgccccctggagaagcaaggaccctcccccactcccgccaggccccgcgcgcccctcccccgcgctgcaggaggcccctgccccggccacctaccgcctgcaggaggaaacgggccaggagagccgcgacttcctgagctccggccgcgggctcaggtccctctcgcggcagcccgcggacttgtccggatccgaatagaagcgctgttggatgcggatggggcgccggggttgccgccacaggtgcttcggggctctggtcatgctgtggcggccgcgagagcgactcaacctgctgcaagcctctgccccttcgccgacccccaggttctccatgcgccagagaaaggggtctgggatagcagggagcaggactcgtccccgtgagcgggcgccgaggagcgtctgctcccgggtccggcccagggccgggagtggaggcgacagcgaggagctgtccgcgccggaggtgctgaagcggtagaaggtggaactggggctcaaggtggggccgacaccgaggagctgtcgatgcccagatggtgctgaagggtagaacaggggagaagaacgtggtgagggggtgttgaagctaggggctgaagagacccccccccaacacaccagccccgaaaaccgtctgccgtcccctatagcgctgcatggaaaagaaccaagacaaggacttggagtggagaagacagaaattgtccactgatcgctgctaaatggagggcagggagacagggtctcaggagacccccggggccgagacggtgtccctcgcaccgtgttgaaagagaaaaaggtagctttgggttctccgggtggatgagacagcgaagagctgtccgcgacctgatggtgctgaaggcaggggagggagaccggggttcaggtgcacccccagaccagggcgtcatccgcccaggaggtgctgaaacatgagcagtgacgggccctcaaccttccccagcaacaatggcaacaaggagtctggaagcagtcaaggttctggtcttcggaggtacgtacagatagcagtctttctgccaagcccaggaaggtaggctccgcggttcagccccagaaggggtctctttggagccctaaaacccccacccatgccaggcagggatatgagaaggacagggaaattggcaaggctgtgagggggctcccatgtctgggatgggcacacagaggctacctctggccagagctccaaacagctaccagtagggatgggcaaagaggggaagtcaggtctctctaagaaacatcctagttctgcttctaagaccctccccaccccaaagccatgctgcagctgagttgggggaggactggcagaaaacccaccttttgtggaagctcaggacaggcaggaggagtatctctgagactctcgtgcttttaaagccacaccaacacacagaccctcagcggaaatggcaggatctcattcgccctgagaaaggcccaggccccacctcacagccacgattcctgccctcaaaccccaggcctgcccctccctcccagttctggaaactcaagtctccacccaccaggcgtcttagtctcaggggtaatttcctgggaagtgcaaggatgggtaagaacattttccatcatggttaactgaagtaggcatgaacagcagcagggctgggcgggtgagtgtggtgcagaaagaggtgagattttgtactcccagggtcatgacttggtggaggcctcctgtgggctctgggcttgggcagggaggcatttaaggccattagggtgcctcttgctgcatcagatttgagaagagccccgatgtttttggaagtctcagaagcactcaacaaggtctttcccatggagaccatctcccagtgaccccagccatgtccccaggttggagaaaaggaaaacatttgggccaggatgtcagacagactgaattcaagccccagtaccatcatgtcttgctgtgtgacgcatgacaaatgactccctctctgttctatgcttgggtggttcagtccctgttctccacccccccaccactcccaagaactgactgtgggagacaacttggctcaatggtgagggacatggtcactggctggctctgtcacttcccctcccaaagtctttttttaaaatattctggaaaagaggaataataatggtgtctccaactcttggcatcattgcaaggactaaaagtgatgccagatgtaaagggtctgagaccaggagctgtgcataccagtgccccctctccccagctcctgctagcatccaccaacaactggtgtgtctagtttgtttgtttgtttgagacggagtctcactgtgttacccaggctggagtgtaatggtgcgatcttggctcactgcgacctctgcctcccaggttcaagtgattatcctgcctcagtctcccaagtagctgggattacaagcacccgccaccacacccagctaatttttgtatttttagtagagacgcagtttcaccatgttgtccaggctggactcgatctcctgacctcaggtgatccacccgtcttggcctccaaaagtgctgggattacaggcgtgagccaccatgcccagccctggtgttgtgtctactttgtaaatgtcatccaaagctcctcacttctctccagcccatggctcccaccctggtccaagcaccagtatctcctgcccagacactgcccaagcctccttcctagtctccttggtctccttccactcctatccctgacagtcagtgctccacaacagcaaccacagggaattttttaatgccaatattgaccaactctctctccggaagacacacctctcactctccagggcaccccatgaggtctggtgtgtggtttcagctcctgcctacttcccggggctcccctcccaccctccagccacactgatctgttttcagctcctgacacacctgatcctcttgagtctgaggctttatacattctgttccttctgcttggaatgcccttccccgcactcccactggttgacttctcttcatccctcaggctaaggatttgttttactgttttttgtttgtttgtttgttttgttttgtttttagatggagtcgcccaggctggagtgcagtggtgtgatctcagctcactgcaagctctgcctcccgggttcacgccattctcctgcctcagcctcctgagtagctgggactacaggcacccgccactacgcctggctaatttttttgtatttttagtagagacggagtttcaccatgttagccaggatggtctcgatctcctgacctcgtgatccacccaccttggcctcccaaagtgctgggattacaggagtgagccactgcacccggcctgtttttatttttttaagatggtgtcttgctctgtcacccaggttggagtgcagtggtgcaacctcggctcactgcaacctccacctcccaggttcaaacaattctgctcctgagtagctgggactacaggtgcaccccacaactaatttttgtatttttactagagacagggtttcaccatgttgaccaggctggtctcgaactcccgatctcaagtgatggaccggcctcagcctcccaaagtgctgggattacaggcatcagccaccacaaccaggccctcaggttaagtttaaatgccacttcttccaggtagtcctccctgagccccctcgatgtgaggtcaggagcctcctctgggctcctctgttcttctccatcacagcatgattactttgtcctgtctctgcctggtatgatctgtctccaccatcagcctgtgggcacctccttgtgcatggctgtgtgcccactgtgtgccaagtacagggcctggcacacagtgggtgctaacttaataaatgctttctggataaggtcaagaagggttcagatggacgaactgctcttcctctcctggggccggcccctttaatccccatcagccttctcacctatctgggaccacgctgtcttttctctgtcccttaagcctcaatggtgaacaccacatgggtactgggctcgacctctccaggcaacacaaggcggctcggcagcgatggcagcaatggggtacccgagaagcctctccggatgataccaccaccaagggggctcacaggggccaagccagaatccaccaactcccagaaccactggaagaaaccagaaagacatgagcaagttcttggtcatgggacctctctaggaccctgaagtgccctcacccagacacctggactggcccagagagctgtatctcagtcctactctcctgagtgaatttacctctctgagcctcagtttcctcatctgtgaagtagggatctcaaacgtggggggatataaatagtgcctggtccaggccaggcgctgtggctcgtgcctgtaatcccagcactttgggaggccaaggcgggaggatcacctgaggtcgggagtttgagaccagcctgaccaacatggagaaaccccacctctactaaaaatacaacattagccaggcgtggtggtgcatgcctgtaattccagctactcgggaggctgaagcagaagaatcgcttgaacctgggaggcggaggttgcagtgagccgagattatgccattgcactccagcctgggcaacaagagtgaaattccatctcaaaaataaaaaatataaataaataaatagtgcctggtccagccaggcccagtggctcacgcctgtaatcccagcactttgggaggctgaggcaggcggatcacgaggtcaggagatcaataccatcctggctaacatggtgagaccctgtctcgactaaaaatacaaaaaaattagccgggcgtggtggcgggcgcctgtagtcccaactactcaagaggctgaggcaggagaatagtgtgaacccgggaggtggagcttgcagtgagctgagatcgggccactgcactccagcctgagtgacagagcgagactccatctcaaaaaaaaaaaaaaaaaaaaagtgcctggtccacagtacacattgcagaaatatttatttattaactaataatagcatgctcagtagggcacggtggctcatgcccataatcccaacactttgaaagggtggtttgaccccaggagttctagaccagcctgagtaaaatagtgagacactagctctacaaaaaataaacaaaattagccaggcatcgtggtgtatgcctgtaaccccagctactcaggaggctgaggtgggaggactgcttcagcccagaaggtcaaggctgtagtgagccaagatcatgccactgtactttagcttgggtgacagagtgagaccccctgtatctctctctctctcttttttttttttttcgagatggagtctcgctctttcaaccacatcggagtgcagtggcacaatctcgccttactgcaacttccatctcccaggttcaagtgattctcctgcctcagcctcctgagtagctgggattacaggtgcccaccaccacgcctggctaattttttggtatttttagtagagaggggttttcaccacgttggccaggctggtctcgaactcctgacctcaagtgatctgcccaccttggcctcccaaagtgtgggaattacaggtgtgagccactgcgcccggccgagaccctgtctctaaaaataaaaataaataaaacagtatgtttatttttataacatattatatgctatataatgctatttattataatgctatgcaccatagtgatattctattgtatattttttcttacatttgagattccaatatattatttattaaaatataaaagtagggcccagcacaatggctcatgcctgtaatcccaatactttgggaggccaaggcaggtggatcacaaggtcaggaattcgacaccagcctggccaacatagggaaaccccatctctactaaaaatacgaaaattagccaggtgtggtggcacacgcctgtagtcccagctactcaggaggctgaggcaggagaatcacttgaacccgggaggcggaggctgcagtgagtggagaccacaccactgcactccagcctgggtgacagagcaagaccctgtctcaaaaaaaaaaaaaaagtaaaacaataaaacatgcagtaaataagcaaatgaataataacgatagtactaatggctaacattttctgcacaatcaccctgtataaatgccgttccaatagtacatggatgggctcatgaaggtataatgaagccatttagcaccattatttccatttaacaaaggaggaaatgaaggctcagaggttaagtaactagagcccaaggttgcaattcataaataaaagcaattctgagcttcagtgccgagttccttgaaggaaggactgaatgggagaaactaaatgagatgctgtttccaagcaggctctgggtaaatgctggatacattttaagaacaggcagaatcagtctgaacggatgcgttgggagtgtgagctcttcagcgcaacagatctgggttcaatccaggccacgtggtccagggcaagcggcctcagtttgcccatctgggaaatggaggcgaaaggggtacggatccctcagaggtgttgatgataaaacaatgggacccacgtgcgccagacacaggctgtgtgctgtccgcggtgctgaccccagaatggggcacaaaactggaactcacagctttggggtaaggcgatcagtgaagacaaatgtggagatgggagaggtggggttcaaagagatggcccagtcttcccctactgtcctcctgagcctcaccaatgagcctatctccaccaccagactgagcattaaaactgggaaactggccaggcgcggtggctcacgcctgtaatcccagcactttgggaggctgaggcaggcggatcgcttagggtcaggagtttgagaccagcctgaccaacatggcaaaaccctgtctctactaaaaatacaaaaattagccgagcatggcgctttgcacctgtaatcccagctacttgggacgctgaggaagcagaattgcttgaacccagggggtagaggttgcagtggaaagatctgggcaacagatctgggcaacagcactcaggctggagtgcaatggtgtggtctctgctcactgcaacctctgcctcctgggttcaagtgattctcctgcctcagcctcccgagtagctgggactacagacacatagtccccatctcaaaaaataaaaaagtaaaaataaaaataaaaaagctgggaaactgccaggcatggtggctcatgtctgtagtcccagcactttgggaggttgaggccaaaagtgagttcaaaaccagcctgggcaccccgtcgctacaaaacattttataaattagccaggtgtggtggtacatgtgcctgtagtttcagctcccaaggaggctgaggcaggaggattgtttgagcccaggaggttgagactgcagtgagctatgattgtgccactgctcttcagcccggcttacagagggaaactctgtcaaaaaaaaaaaaaaaaacggggctgggcacggtggctcatgcctataatcccagcactttgggaagccgaggtggatggatcacaagatcaagagatcgagaccagcccggccaacatgctgaaaccccatctgtactgaaaatacaaaaaagttagctgtgcctggtggtgcgcacctgtagtcccagctactcagcaggctgaggcaggagaatcgcttgaacctgggaggcagaggttgcagtgagccgagatcatgccactgcactccagcctggcaacagagcgagactacgtctcaaaaaaaaatggggaaactgaggtccaagaccatgctgctaatcaggaccagagccagggcaaagtggggtgggaggaagagggtgcggagaacggatgtgagttgaacttgaacttctgtgtgtgtaagggatgcaacatagctcatttccttgcctatgagtggagggccctctgactcgtgttgtggaggaagacatcaaagcttggagagaaaatgacctgcttgctgggagtcacacagctgggggcttgagccacgctcagatctcatccttctaggactgttccccgcatttgagcacaacttgtccccaccctttcccaggggcacctgaaatttaaggcagaaatgcaagtgctctacaagaggcctccctcgggagagttcctggtagctgggagggtgtgtcgggaatgaagagggtggggtgtgtggggacagttagcatctcccagatgggaggcccctgagatgtcagctgctcattttcttttttcttttctttctttcttttttcttctcttgtttttttttttttttttttttttttttttgagatggagtctcgctctgtcgcccaggctggagtgcagtggcgcgatctcggctcactgcaagctccgcctcctagtttcacaccattctccggcctcagcttcccaagtagccgggattacaggcacccgccaccatgcccggctaatttttttgtatttttagtagagacggggtctcaccgtgttagctgggatggtctcgatctcctgacctcatgatctgcccgcctcggcctcccaaagtgctgggattacaggcgtgagccaccgcgcccggccaagacagggtctttctctgtcacccaggctggagcgtgcagtggtgcagtcttaactcactgcagcctcgacctcctaagctcaaggatcctcccaccacagcctcccaggtagctgagactacagtcacacaccacaactcccagctaatttttgtattttttgtagagacaggatctcactatgctgcccaggctggtcttgaaatcctgggctcaagcgatccacaaacctcagcctcccaaagtgctgggattccaggcttgagccatggcgctgggcttgtctgcccattttcctgctgggaaaacaaggttccagatgggagaactccctgcacacattcctatttgttcacgtattcattgaacaaatgcaaaaaaataattcacctcgtgttaggaagaaaagaaaactggacaagggtctgggaatgagggagtggatcacattgctggggtgagttagggaattttctgaggaggtggctttgagccgaggcctgaaagaggagaaagagctggccaggagaaagataggggaacagcataccaggcagaaggaacagcacctgcgaaggcccggaggtggcaacaagttggtaggtttaagaaatgggaattggtaagccaggcactgtggctcacgcctgtaatcccagcactttgggaggccgaggcaggcagatcacctgaggtcagtaattcaagaccagcctggccaacatagtgaaacccttgtctctataaaaatacaaaaattacctgggtgtggtgttgtgtgcctgtaagcccagctactcggtaggctgagggaagataattgtttatgcccgagaggcggaggctgcagtaagccgaggttgcactgttgcactctggcctgggcaacaaagggagactccatctcaaaaaaaaaaaaaaaaaaaaaaaaagccaggcacagtggctcacacctgtaatcccagcattttgggaggctgaggtgggcagattgcctgagttcaggagttcaagaccaacctggccagcatggtgacaccctgtctctactaaaaatacaaaaaaaaatagccaggcatggtggcatggggcagtaatcccagctacttgggaggctgacgtaagggaattgcttgaaccagggaggtggaggtttcagtgagccaagatcgcaccactgcactctagcctgggccacagagcaagactttcacctcaaaaaaaaaaaaaaaaaagggaattgggagccaagggccagggtggagggaagttcattgcttcaggggctgggtgaggacttaggatttgattctgggagaatgttgaggttttgaggaatgtgatctacttggggatcacaggaagcctgctgtggccaatttggagagcagggcctatccctggggcagaggctagagcagtggccaggtgatatggaccagagcggggcctgtgagtggatctgagatatgttttgggggctgaaagacaggccatagccacggggtgtgagaaagagaagattcaagggtgactggtgactttttttttctttcgagacagagtttcgctcttgttgcccaggctgtagtgtaatggcacagtctcactgcaacctgcaacctctgcctcccattttcaagcaattctcctgcctcagcctcccgagtagctgggattacaggtgcccaccaccatgcccaattaattgtattttttagtagagacaggatttcaccatgttggccaggctggtctcgaactcctgacctcacgggatccacccacctaggcctcccaaattgctaagattacaggcgtgagccaccacatccggtggtgactggtgattattaagcatgattacttgtttttcagaaagccaggagtcacacagttacctggggaatggggctgccattacttgcatggggaaaattgggggaagcaccaggctttgggtgggttccaatttcgctggagcatcacatgagtcccagatggagccagcagaggcagctgaatgtttggatctggaattatgggggacctggctcaactgaaggtgaaacagacctaacaggtctgggggcagttgccagcatctggctgttggtcagatgcgggggtgctcccaagagccctgattcctgggacccagccagctatccctcccccatctggagtggaatggggtaaggatggggctcccagggactagggatggggtatagtggggtgtcctctggtctcagctgcagcacacatcaacctaccactcctgattttttatcttttatttttgagacaaagtctcactctgttgcccaggctggagtgcagtggtgccatctcggctcactccaacctccaactccctgtttcatgtgattctcccacctcagcctcctgagtagctgggattacaggcgcccaccacgatgccaggctaatctttttttttattttttatttttttatttttagtagagacagggtttcaccctgttggccaggctggtctctaactcctggcctcaagtaatccacccacctcggcctaaagtgctaggattacaggcatgaactgctgcacctggccctgctactcctgattaattgccctcttcattaagaagctgggatggggatggagggcctgatgggaggctcctgggtggggaaggccttcgtaggagaccctgagctacctcccctttttgttttgttttgtttttttttttgagacgacgtctcactctgtcacccaggctggagtgcagtggcgcagtcacagctcactgcagcctcggccccctgggataaagcaatcctcccacctcagcctcccaaagttctgagattacaggcgaccgcgaccacacctagctgagagctcccttttgttgttgttgggttttgttgttgttgttgttgttgtttgttttggtttgttttttgagacagggccttccctcttgtcacccaggctggagtgcaatgacgcgatcttggctcaccgcaacctccgcctcctgggttcaagcgatccttctgcctcagcctcccgagtagctgggattacagtcatgcaccaccacacccaggtaattttgtattgttagtagagacggggtttctccatgtcgatcaggctggtctcaaactcacaacctcaggtgatccacctgccttggcctcccacactgctaggattacaggcatgagccacagtgaccagctttttttttttctttttctttctttctttttttattttctgttgagatggagtctcactccttcacccaggctgaagtgcagtggcgcgatattgtctcactgcaacctctgcctcccaggttcaggtgatcttcctgcctcagcatgccgagtagctgggactgcaggcgcgtgccaccatgcactgctaattttttgtatttgtagtagagacagggtttcaccatgttggccaggatggtctcgatctcttgacctcatgatccgccagttgtggcctcccaaagtgctgggattacaagcatgagccactgtgcctagcctgttgttggttttttgtttgtttgtttgtttgtttgtttgtttgtttgagacagagtcgcactctgttgcccaggctggagtgcagtggcacaatctcggctcactgcaacctccacctcctgggttcaagcaattctcctgcctcagcctcccaggtagctaggattacaggtgcctgtcacaacacccagcttattttttgtatttttagtagagacagggtttctccaggttggcgaggctggtctcaaactcctgtcctcaagtgatccacctgcctcagcctcccaaagtgctgggattacatgtgtgagccaccgtgcctggcctctttgctgttccttaaacctgcctcggggcctttgcatgtgctgtgccatctgccggggacacccttcccccggctgttaaaatggccagctgcttgtttccatccatacttcagctaaaatgtcaacttcccggagaaggccctcctgcccagctcgagcagtctcatgagcactcacccaaccccacattttctcttttttcttgccttaacatctgtctcatgagccctgtcattttggggcctgtcactgcagttctgtgtcctacacactcagcatgtggcttggcacacagcgggtgcccatgtgcaggtgaaatgactgatgctgtgagctgagtgtgggagaggtcatcagaaggtcctttatttatttattattatcattattttttgagacggagtctcgctctgttgtccaggctggagtgcagtggcgcaatctcagctcactacaaacttcacctcccaggttcaaacgattctactgcctcagcctcccgagtaggtgggattacaggcacctgccaccatgcccagctaattttttttttttttttttgagacagagtcttactctgtcatccaggctggagtgcagtgcagtggtgtgatcttggctcactgcaacccctgccttccgggttcaagcgatcctcctgcctcagcctcccaagtagctgggattacaggtgcccgccaccacaccaggctaatttttttttttttttttttgagatggagtctcgctctgtcacccagcctggagtgcagtggcatgatcacggttcactgcagcctcgacctcccgtgctcaagcagtcctcctaccttagcctcccaagtagctgggactacaggcgtacaccaccatgactggctatttttttttttttaatagagatagggtcttactgtgttacccaggatggtcttgaactcctcggctcaagcgatccacctgcctcggcctcccaaagcgctgagattacaggcgtgagccaccgcgcccagactacccttttcctttcctcttcctgcagatggctggagtgtggataaataaacattaaggcatatgcagctacgcctgccctaggagacccgaggctcaccctgagcaccctcattccacacaaagttagcccagttttttaacacacaaaaacgctgagttctggccaggtatggtggttcatgcctgtaatcccagcactttgggaggctgaggcaggtgggtcacttaagatcaggggttcaagaccagcctggccaacatggagaaacccgtctctactaaaaatacaaaaatcagccgggcgtcaaggcttgtgcctgtaactccagctgctcgggaagctgagggaggagaatcacttaaacccgggaagcagagatggcagagagcaaaaatcacatcactgcactccagcctgggcgacagagtgagaccctgtctaaaaaacaaaacaaaacaacaacagaaaccactgagtcctagagaggttaccagccactcaggtgatgggcctgggatttgaatccagcccccgcagggttttcctcttggctcagtttcccagaatgggggcactggctgtgatctgaagttgtgacctcatgacccactgctcaggcccgggggcagccaggtccccttttcttgggtgagtcaaaaccttgtgtccaggcacaagggatctcctgctcccaaaagcagtggccacagccctgggctggacagttggatcaggtccccaattccctggtggcctctctgggcctcagtgggcccctgtgagctggtccccgagcagctctaagtgtttcttttttttttggtggtggggacagagtctcactctgtctcccaggctggagtgcagtggcgtgatctcaactcactgcaacctccgcctcccaggttcaagcaattctcctgcctcagcctccaagtagctggactacaggcatgagccaccatgcccagctaagttttttgtgtgtctagtagagacggggtttctccatgttggccaggttggtcttgaactcctgacctcaagtgatccgcctgcttcgccctcccaaagtgctaggattgcaggcgtgagccaccgcgcctggccagctctgggtatttctcagtagagggtctctgggatctccccaccatggcctgggccacccccaccccctactcacttcactcagcaggaaggagagtgttgtcctgctgtgcctcatgctgctggcatctgtggccctgcagaaatggttctgagacctccagaccactgggagcccaggtacggccctgtgggacaccccctagacagaagctcactcccacactctctgcaccctcccttgaaccccaaggaactaaatcaaggtggcatggaccacaccacaggcaccagtgtgagacacccgcccggaccttgcagcggtccccatccagggacagcagccaggtgcccaaagcccctccccacacctgtccaggttcagcagcctgggtgggggcatcaggactggcgaaacaaggtctcctggccccagacacatgggagacccattcagctcccagagtggctctgatggtttcagggggattacgagaccccagcacctctcctgagacgcccccaagctcaagaataagcttgctccaggaggcccaggcatgtctggcacttaccaccactgcggagtcctgcctgggtcccatgacctgctggctagtgagggaaggaggggagaaaatgacctgaccaagagggaggcccagggctccctcaacacccactcagcggagccccttaactgtctgggcaccaggccaggacataatccacacactttccttgggtgaggctcccagtgggtggagggcagagtgtccaagagggcctgaggggacgagagagtggccaagagggtggccgggcatggagggggaggggcggggagggcagaggaaggaggggggaaggagggaagggaggcgtaggagtgaggaggctgggtgagaggtgttaagattaattgttcatgtgtttgcatatgatagagtgagagagagggcgcgaaggaagatggtggtaggggaccagcagctctgggaagggggggattttatcaactcagggtctaggatatctgcttccaagcagagcccatggggtgtggcctaaggagcttgggggctccaggaaagttgcccgctgtgctgtgccgccccgggtagatcaaagaccctctctggtcattggctgggcgcggtggctcacgcctgtaatcccagcactttgggaggcggaggcgggtggatcacgagatcaggagatcgagaccatcctggccaacatggtgaagccccatctctactaaaaatacaaaaaaattagctgagtgtggtggcaggtgcctgtaatcccagctacttgggaggctgaagcaggagaatcgtttgaacccaggaggcagaggttgcagtgagctgagatcgtgtcactgcactccagtgtgggcaacaagagcgaaactccatcttattaaaaaaaaaaaaaaaagaatggcttgaacccaggagtcagaggctgcagtgagccaagactgcactactgcactccagcctaggtgacagagggagactgtctcaaaaaagaaaaaaagagagagagatggggttttgccattttgcccaatttggtctcaaactaccaagctcaagcaattcacccacctcagcttctcaaagtgctgagattacagtggtaagccaccatgcccggcacccccagttttgtttgtttgttttgagacagggtctcactctgtcacccagactagagtgcagtggtgcaatctcagcttaccgcaacctctgactcccaggctcaaccaattctcctgcctcagcctccctaatagctgggattacaggcacacaccaccacgcctggctaatttttgtatttttagtaaagatggggtttcaccatgttgaccaggctggtcttgaactcctgacctcaaatgatccacccacctttgccttccaaagtgctgggattacaggtgtaagccactacgcctggccctattttttttttttttgagatggagtcttgctctgttgcccaggctggagtacaatggggcgatctcagctcactgcaacctccgcctccctggttcaagcgattctctgcctcagcctcctgagtagctgggattacaggcacctgccaccacgctcagctaatttttgtatttttagtacagacagagtttcgccatgttagccaggctggtctcaaactcctaagctcaggagatctgcccgccttggcctcccaaagtgctgggattacaggtgtgaaccaccgcacccagccaagtgagctcctgattcttatctgtccctgccttgagtctgtggatcccctgaaagtaaagacatggtccccactgtgaccccagcacagagcccagcacatagtaggtgctcagttaatgttttcacacgagtccataactcgtgttttcacacgaggccttggatgaatggtaggggctttatttcctcaggttctgctcctccccaggaaccccagccccatccatgcccccatctctgttggctcctcagggctcactcctggaggtggtgggcaaaggacaatctgtcattcacggatccctgaggaaggaacacacagggaggcattcagacaccaaaaggctctgcagcccaggttggccctgcttgggatagcagctcccccaaccatgccttggccccagggctgagcccccagcccagccctaccttaccatggacacctcgtccaggttctcaaacttggactcattccggtgacagaatctcacagccatgaccacagacccgatgagcaaaagagacaccagcaaacacacgaccaccaccacactcgggttcctgtgtaactcacggggcccagtgtcacctggagctggggaaaggaactcagagtcagcactgggtcctattccccacaagcctaagacacccaccagggcccagagccttttaaaatctgttctcaggaagctgacctctcttccctctccagttgaggctgccactttttaatcatgtattttagagacagggtctcactctgtcacccaggctggagtgcagtagtgcaatcacagctcactgcagcctctatctcctgggctcaagtgatcctcccacctcagcctcccaagtagctaggattacaggcatgcaccaccatgcctggacaattttttttttttttttttgagacagggtcttgctctgtcacacaggctggagtgcagtgacgttatctcagcttactgtgacctccatctccaaggatctagtgatcctcttacctcagcctccccagtagctgagactacaagtgtgtgccaccacacccagctaatttgtgtacatatttagtagagatggggtttcaccatgttgcccaggctggtcttgaactcattggctcaggtgatccacccgcctcggcctcccaaagtgctgggattacaggcgtgggccactgagcccagcctaatttttaaattttatttaatcaattactttatttatttttgagatagagtcttttttttcccccccgagatggagtcttgctctgtctcccaggctggagtgcagtggttcaatgtgggctcactccaacctccgcctcctgggttcaaattattttcctgcctcagcctcccaagtagcccggattacaggcgcccgccaccatgcctggctattttttgtatttttagtagagacggggtttcaccatgttggccaggctggtcttgaactcctgacctcaggtgatcctcccaccttggcctcccaaagtgctgggattacagatgtgaaccaccacgcccagccatttttattttatttatttatttatttgagacagagtcttactctgccacccaggctggagtgcagtggcacgatctcagctcactgcaacctctgccgcctgggttcaagcgattctcctgcctcagcctcccgagttgctgagattacaggcgtctgccaccacgcctggctaatttttgtagttttaatagagacggggtttcaccattttggccaggctggtcttgaactcttgacctcgtgatacacgccccccccgcccccgcccccgccctcggcctcccaaagtgctgggattacaggcttgagccaccgcgccccgccatttttagatttttttgtagagacaaagtcctgctattttgcccaggcccaaatacataatgtataacctgtctccccaccacagcaagtattagtttctctctttgcccatcgctgcgtgcccagccgtgacatacactaggcacttaataaatgcgcatagcatgaagagctttagacaatggagcagagacaagaagcccttcctagagcattctcggggctgtacctccccctggtggtcagttccaaaactgcagcctgttacacccgccacctccctacaaacacccaaatctcttaatactcacctgggccagggggctccaaggtctggtcagtggaggtcaagggctccgttccggggctgtgggaagtggggctccagtgcggggtcagggattcggaactggggagggtggaatgggaagagggggtgagctctgcactgggggagccagaactagggtgcgtgattgtctctggttgtggggaggagggtatcatccttgaatctgtggagctggggctcggctggatggtaggggttgcccctgaacttgaggggctgaggtgggttatggagtctgtctccaaactcatggtgctggagtaggatttggggggttcccctgaactgtgggtgctgtgggcgaagggagaagaaatcagagagctgacaggtgatgtctccatactgttctctgaggtcacaatatctggaaagaaaaactgggcgcggtggctcacgcctgtaattccagcactttgagaggtcaaggtgagagcatcacttgaacccaggaattagagaccagcctgggcaacatagcgagaccctctctctctctctttctctctctctttttttttttctttttttgagatggcgtctcgctctgtcacccaggctggagagcagtggtgccatctcagctcactgcaacctccacctcctgggtacaagcaattctcctgcctcagcctcccaagtagctgggattacaggcgtgcattaccacgcctggctaatttttgcatttttagtttcactgtgctggccagatttgtctcgaacttctgacctcagatgatccacctgccttggcctcccaaagtgctgggattacaggcataagccatcatgcccagccttttcatttttatttttaattaatttatttttttgtccaggtcatagggagacctgaaagatttaggacaccatgtgagctctcagtgggaaactgaagctcccactcaaattcatgctcctggtctgaagtcccacagcctgggttcaagtgcagatcagcgttcccagtcctcttggctgagagctctagaagccctttggatatgggaagtgactgcatcccaggcagtgctgggcagctcctttaaattttctgggactcagttttcttttctgtaaaatggagttcatgtggagttggtgcctctgacagttcatcagtcaggttcatagtgggtgtacacaagctgggtgctcccagctactggggaggctgaggcgggaggattgcctgaccccaggaattcaaggctgtagtgcgccatgattgcgccactgcactcctgcctgggagacataatgagaccttgtctctacaaaaaaataaaacaaaaattagccaggcatggtggtgcatgcctagtcccagctactcaggaggctgaggtgggaggatcgcttgagtccaggagttcaaggctgcagtaagccatgatcatgccactgaactccagcctaggcaacagagtgagactccgtctcaaaaaaaaaaaaaacacacacacacaatagaatagaaacacagtgggtgcacagtgacactcaactataaagatccacctatgagctcagagaggatcagccctaattttctccaggtagccctaggctaacctcaactttaatggaagacacaaagacacaggcgctgggaacatgtctccggaacccacccttctacgtgttggtccagctacttcctggctcacatcccatcccaggcatggagtccagggaccaggctgagggcaggtaagcagttcatgagccacctcccacaacgacttcccacccagttccaggtgactgggcctcttaggcacttacaagttcattcatcaactctctgctccacccatgcactctgctctgggccaaactttgtgcttcctccttgactcaccctaggcagcagaaatgcggaaataacacacaacactggccctgagagggggctgggtccacatgccaccctccccagatctctatgtagccccccaggccctgtggggatgacggctgagtctagaagaggcatggaactcaggctgggcttcatccccatttgacagatgagaaactgaggctcagagtagcagagggtctggcctgaggtgactggggagctgggaagaacgcccctcaaggacccttgtcctctgtttctgctgaaatgaagatgattcagaggccagagtggaccccaagccaagtcagaattctggggagctgagtgcttagtgaactgaggaaaagctgtggacttgaaaaaggaagagttggaggacacaagccctgttgagtgcctggcactgagtaggcactggtgagctgctgaagggttgaccagaaggtaaaaataaagatgtttctaggcactgtgctgggtgtttgctctccccagagactcctagactgggaggctcacatgagccaagtcaaccagttctaatctgggtctgggacaagctggactgagcctcagtttcctgagctatgaaatggggataaaagtggtgccttctgaatgaaacccttccctgcaatgagcatttcagcagccatggtggcctctgctctgctattacaggtctgtggggtaggacaccggtcagagagagtgacaacatagtggcaggtaaagggcagaaaaagggaatgcgagaagctcaaggctcctcccctccaccctaggcactgtcttataggagagcaagagggaattaagtcagacacccagaagaacttctcatgggaaccacagatgtttgatgaccaggaagtgagtccctgttccctggaacccccatggccctgaggtcttcaccattctccctttggggattggctaaaagcaacagatttgaaaaggagcccaaaagtaggtgtgaggccatctgtggcctccagcaggttcagggctcactggagttgcaggacccacagccccagggcttgggagcagcggtgcctcatctgtcctcacagctgctccgtttgtttctgggggaaaacccagccttcctcggagggttggcggaccagcgtggcctgagggaggggtccagaagccaggtgtgtgactgggctgtgcgtcccccacccccacccttccgctttctggaagctgagcctctttaccagctcttacctgtaaagggagtattgtaattcacaccagctttcagcagcaccaccagcaccaaaagcagaagtggcggcagctgggggcacgccattcctgcgccgggagggcctgccaccggctctgcacaggtgtgtggccaggtgtgtgcccaggtgccagctccttgcacctgcgtgtgcgctccctgctggcggagcgcggggctgtgcaggggcaaggcgcaggtggggctgcagggtgtgggacctccctggggcgctcctgttcccccgggtgcggttctcgccctcttcacctggactccaccccttctaaacacgacgacccagaagctctcaaagccagtcatccactaaagacaccctgcccctgccgtcctctttccccctgctcctggttccacagctgcccaaacccctgctgtcactccctctgcccctcgtccagccaggttgtcccctctgggagcaccaatttctcccacctccctccgatccctgaacccacagggctggggatgtccttgttctctgtcctcgtcctcctctgtcctctgtctcacccagactggggccttttggggacatgactgaaaccttctaaccttctagcatttctattatggatttctttttctttcttttattcttttttttttttgagacggagtcttgctctgtcacccagactggagcgcagtgatgcaatcttggctcactgcaacctctgcctcccgggttcaagtaattctcctgcctcagcctcccgagtagctggcgcccgctaccaggcctggctaatttttgtattttttagcagagacagggtttcaccatgttggccaggctggtctcgaactcctgacctcaagtgatccacccgcctcggcctcccaaactgctaggattacaggcatgagccaccgtgcccagccctttttttttttttttttaagagacggggtctcactctgtcgcccaggctgaagcacagtggcacaatcacagctcactgcattctcaaactctgggattcaagcaacctcccgcctcagcctcccaagtagctgcgattacaggcgtgtaccaccatgcccggctaattttttttttttttttttgagactgagtttagctcttgttgcccaggctggaatgcaatggcacaatcttggctcaccacaacctccgcctcccgggtccaagcgattctcctgcctcagcttcctgagtagctgggattacaggcatgtgccaccatggccggctaattttgtatttttagtagagacggggtttctccatgttggtcaggctgatctcgaacttctgacctcaggtgatctgcccacctcggcctcccaaagtgctgggattacaggcgtgagccaccgtgcctggcctttttttgttgttgtatttttttttagtatagatggggttttaccatgttggccaggctgatagctctaactcctgacctcaggtgacccactcgtcttggtttcccaaagtgctgggattacaggcatgagccaccacacccagccatcctgtaggattttttaggggtgagggacttgaggtgagtgctctgggccaggtcccaggcacatttctagagtgcactggggacagtttccatctgggacgggctggacaccaccccactacctgtacgtggatatggcagaggcacagctgagaccacattggcagtgcctgacctccaggaaagatttgaggtccccatgctggccacagaccccagatgcatactgcatggttggtaacttcagagttctcttccctctgggatgttccagattcccccactatacccaagccacttccattaacccagaacacatcacccaagatctaggctgtggaggactttattcattagacccagagagccatgagtgcctcccacgaagtccccactgcagggagccagggtcctagatgccaggccaatgcatgtgccgtgagctggccgaggggtctgctggtcccaagagcgcctctgtgttcttcagacagctccgggtatggtggcctcgccaggtggcttgaactatcttcgctgccatttgctgctgcctcatctgctggcggatcttaaagcccctccaggcggactggatggctgtggccgctttgtcctggcgatgcggctgcctgggactcagggcagccagctggtaggcggaggcccaagacactgccccggggccctcagtgccctggcccatgccctgcaccacacgggtgggctgtgtgcgtccacaggtatgacaggtgcgagggctggagcccactagcatcaccacgctgggcgggctcccgatcctggagctcagggagtggcagacgctgcaagcgtgtgcctggcaggactggaagcagcgatggtcagatactgtcctggctctgccatcctggaaccagcttcggtcagacatgaccccggcccggctgcccagctccacccacgtgacggggtggagcatctgccagtgccgggcttggtcccggcgggtgctgtagccgcgccaggcagactggatggtcgtggtggctctgcagaggtgtgccaggttccgccgcacacggtagccgcgccaagtagcttggatgaccatggccccccggtgccacagccggatcctgcgacgcgccaggtagccacggacgcccgcctggatagtgatcactgcgaggatgcggatctcctctgcagcctgcatggacaccattggctccccggaccgcctgggaggcaccaccgccttgttgcgccaggtgtcccaggacgcagcacccctggctggctcccatgcgcggttccacgattggccaccaaccacaccagcgtccgcggggccctggagtatagtggagttcagggatgccttgtgactaacggcaggattctgggggctataggagtcctgccgtctccacggtgactcctggttaaaaaggggtggcagggaaccacttggggaagactcatagcctagagacaccctccgaactcccggggccagcggaggaatgaccgaggagtgtgtcatctccccagtgcggatgacgggccttacctctgcagagggcctgtgggtggggtttgcaccacttcgggctgaggcctgggatggttgtctttgcacatactgtaagggcctaaccctggccacagaactttctagcagttctggaacaatcctaccatgcacggatctgtaggaatttttagggcccatggcgtcccagcggctgctcggagccatgtttccagacactgttttctggagtggattggggacagcttctgtctggaagggactggacaatgcccttctagccgaggacggatatagtggcacatgtgagaccatgctggtggtccctgacctctgaagaagactaggattccccatcctgcccacagacactgaaagcaatctgaaagcctcagtactgccacgggccagctggggtgatcctgagactacattagaagccactgtaccctgagagtgatttgggggtatgacgtgagtgacagacccctgttgataaactgagggggacttagtggctaaacccggggcctggaaagggacagggaccatgccactagcatggctgggagccacctcccttggggaagagaccctttctcagacagggacctatgatcatggcccccatcagctcccagaggactggagtacatccactgggttgcaccagtgaccctggctttgctgaataggtcattggatccacttgatcctgacacttggaacacagcctcatccaattctcctagcttggcttggtcccctgtgaccccagatggcattatcctagcatcttggctcaattgtaaggctcttgatagaaccgtgggcactcggtgtagactcctcactgtgccactagctgccggggctgaggagtgacctggagccagactggtggtgtggggcatctgcaagggggctaaagacctctccccagccaggctttgaggtaaggaggggcagtgatgtcaatcaccatgggccccttggagcagctctgagccacactagaggcccccatcattggcacagaaccagggggacaactgggctcacccgactcactactgaacctgggagcaagtttggagcagctaagctagcggagggtcttacagatagacttggcttctttctgtctgccatcagactgggagccacccaactggacacagagcctgcgggaaggctgtgacccatgcctcggatggtggagcccgggggaaggctggaggttatgccaccaggcagagtgcctgggactgcgcccgtgctcattctactggctacaaaacctcctgccgcaccacgaccagccctgctcttcagagagtcctgcggaatcacatctctctgctggtaactgggtgggaccatggatgcctcagaagggtgccagcagtctatgttttttggaataaccacactgatctgggagctgctggggtccatgctgttcagggaaagattagactgagtcacggccagtctgttgggcactgaagccagagaggggctgggggccatccctgtggttccagagggatgtgtcaaagggccacctgcctctaagacctgggatgcaagggaagccatgccattggccacctgacattgactttggcccatgccagttgctatggttctccaggggagattcccagctaggccaggagatgtggtcccctgagacccactggggaacatagcatcagccaaaggctcctggggatggcttacagccacacccctgaacagaggcgtgattcactggcctacacaacaggcctcctcatcagcatgagagagatttggtgttgaaacactaaccacagagggtggacacacatgcctcccaccaaccctgggtggatgatggaacccaagggacacgtcgttgaacttgaagtccggggggctggataccatctcactaaccatcagaggttcttcacataggttcaccccagtacccagggatggctggttcagaccctggtccatatttccagccacagagggatatggtccacccaggctaactgaaacaaacgctgatgggtgacacagacacggggctactgagtccacccttgaacactgcagatttgaatccagcctagagccccagcatggctcattgaggccatgacatgtaccactgaccacagatggctgggatcggcttggggccaacctagtgtccgggggtgactgagccaggcttagggcttccgtgtgggccacagatggtgggaataggctgggggctatagctggctcggctaggctggaggctagggtacaggatgaatttgtcttgcctggactggaggccacagatggttgggcttgccttggggatactgcagtggtctgagatgggtgggctaggctggagcccgccccactggccacatatgggtgagctagacttggagacaacccatggggtcctgatgggtgggctaggcttggggacacaccaatggcttgagatggctgggctgggcttaaggacaccacacaggtcataggttggtgggctagccttgaagacatccctgtggcttgagacggctgggctaggcttggggatacaccacaggccataggttgatgagctggtcttaagggcactgcagtggtggcctgagatagctgggcaaggcttggggacacctcactgggcatagatcgatgaacctggcttggggacaccatacaggtcatagatgcatgagctctgctaggggacatcctgctggttatagatgcgtgagcttggtttggggacaccctggaggccactggtgggtaatcttgtctaggggacatcccactggcttgagatggctgggctaggcttgaggaaaccctactggccacagattggtgggctacacttggggacaccccagtggcctgagatggccaggtcaagcttggggattccccagtggactgaggaggctgggccaggcttggagactcccgaatggccatagatgggtgagctagggttggggacactccaatggtgtgaaatggcatggctaggcttggggacactccaatggtctgagatggcatggctaggcttggggacactccaatagtctgagatgacatggctaggcttggggacactctgatggtcagagatggctgggtcaggcttggagactccccagtgggctgagatgggtaggctgggcttggggacatctcagtgggctgagatgggtaggctgggcttggggactccccagtgaccacagatgggtcgcctgggcttggggacacctcagtggccataaatgggtaggctgggcttgggaacacctcagtgcgctgatatgactgggccaggcttggagactccccagtgaccacagatgggtaggctgagcttggggacacctcagtgggctgagatggctgggcaaggctaggggactccccagtggccacacatggatagtctgggcttggggacacctcagtgggctgaaatgggtagcctgggcttggggacacctcagtggccatagataggtagcctgagcttggggacatctcagtaggctgagatgagtagtctgggcttggggacacttcagtggccacagataggtagcctgagcttggggacacctcagtgagctgagatgggtagcctgggcttggggacacctcagtggccacagataggtagcctgagcttggggatatctcagtgggctgatatgggtaggttgggcttggggacacctcagtggccacagatgggtattctgggcttggggacatctcaatggccatagataggtagcctgggtttggggacacctcagtgggctgatatgagtaggctgcacttggggacacctcagtgagctgatatgggtgggctgggcttggagatacctcagtgggctgaaatggctgtgccagggttgggtactccctaatggcctgagatgggtaggttggacttggggacacctcagtgggctgaaatggctgagccagcattgggtactccccaacagactgagatgggtagtctggacttggagacaccccaaaggcttgagatggctgggccagatttgaggttaccccaggggcttgagatggctgggctaggcttgagggctccccactgtccatagatggctgggctaggttttgggacccccagttagccattgattggtgaccttggtctgaggccactctaaaggtccttgatgggtgtcctcggcttggggacctcctagtcaccacagatggctgtgctggtcttggtgtcactctattaggcacagaggagtgtggtagccttggggtcacccaattacccatagatgggcaggttagccttggggataccttactggatgctatatgctgggataggcttggggccagcctactgaaccctgatgcctggcctaggtttggggctaccctactggccagtgtagcctgggacacaattggggccaagctcttggccacagatggtggcttatatgcagtggagaccacagtacctaaagacagagtcctcctcagctctgtcttgacggttgcctgggacacctcaatcagattcacagagctcttgcctaaggagaacttgtggatctcagcctctgagccccagtgaacacgcaaggtcaagcagttagacactgagctgtgttggaaactgggcactttctccgaggctggagtgggccggtaggggaagtgtagggtcatgtacctatagccggtttcagtctcttgcgtatccttaaacctctggagtgtccccatggactccggaggaaaaacagacttcaccgcaaggtccccttctaaactgctttcccgtgactcatctatcttgttgacggcaggcaggctggccacagacatagtggaaaggctgagggaactagaactttgcagagagctttcggaattgttctcctgactgtaggtcacaaagccctgggagaagctcctggccaggtcaccgtctcgatcctgtggcaaaccacctactggctcaccgaggatggatggctggtggtctgttgctagcttctgggggcagagcagggcagacacagaaccctgtgttcgattcctcccctgtccacagacagatgtcttgggacgaacttgagccaatgcactgccgggggaagcttgaaacagaccatgagtcttggatgcctgagttttggtcaccatggtgacctgcaagggacttggggcccccttgtctatcacctccctagtacccgggggggcctgtttgcgatttgggggctgatacctcctccccaggctctccctggaagccctggatgcctgctgctggcctctggccactaagggttggtagagaccacgatgtacccctgaggactgacaccaaggcaggcccccacaggtgaggtaaggctggtgaacatgggcagccctcccaccacccacgctgcaaggaagcctacccgaggccaccctgccctccctggtcgatagataagaggccaccctgctgaccacatgtggcctgtggcagctcggggctgtgccatagatcacagagggctggttcatgcttgggcccacacagttggcaatgagaggctgccacagactcgggggtggctgcatgtgggacagcttgagcaaactggggccctccccactcccctcggggttaaaatctgatgccaatgtgccaggctccagggtcgggcatgcttcttccttttggaacttggggctcaaatccaggtttgaggagaagtccctgctggactccatcatctcccgggacagcatgggatacaggccagtgatcaggggaccctggtgaatgctggtgatgacgctacccatcaccgaggctcccacagtgaccacagataagcagggtgacccccacaagatggccccatcaatcccccatctcctccaagggcccggcaggttggcccatggtgaaacaaccccagatcccaacctgggaatccctgaccttgctggtctgtggtctcacggggcccagggagggcccccatgcggccgatggactcctcctgcaggccaccttcaccagggccggcgtcttagtcaccccgcttcctgttgatttcgaggcggccttggggaggatggttccagtcctcagggccacccgacaccaagactggctcaggagagcacccagctcaccctgacacagggcctggctcagagccacccactcctcctccgtcaaagccttgctaagcacctcggccaatttaccctgcatgaccttggtgagttccgcccgcagctcgccccgggacagggctcgggacagggtcaggcgcagctcactccaggacagcgccttcaccagcgccatgctcagcatgctctggggcagggctttggtgacagtggcacccaggacctccttggacagggcctggttcagagctgcccagacttctccctgggagagggctttggccaacagagtgcggagatcctcctgggatgccagcacaccagctacttcagcacacaaggaggccagcagggagcctaccgtgtcctcctggcagggcaccgcctggccgggcattgatggctgggcacgtgtggctccgttgtctccccaggactcaacgttgcatgtggaatggccggtgggtgccatcggcggcaccagcataccctggacctcacaggctgccgggcatggtcccccctgagtggtcttccccggcacgtgtccgtggggctgtggctgggtctgtctgtcctctggcttggcccagggtggggcgctgaggccaccgaggcgctggcaggcgtggttggacaccttggaccctgttaggagcacctgggagtgggtgttgctgctgagatcagcagcctggtgcgctgggatgaggcacgtggttatgtctgtgatcggctgcccccgggactgcgtcttggtcagacaggtggctagaggcgcttgggactggaccttcacggcacctgtggccagatgtgtctgggaatgcatcttgctcagacaggtgtccagatgggccagggatggggtcttggtcagctcagtgggcagatgtccctgagatgaggccttggtcagcggggcggccagtggtctctgggacaggcagggtggatgtctctgggatgaggcattggtcagtggggcagccagctgtccccggggcagggtgacagccatgtctacaggcacatacacgtgaggtggcttgtccccttcctcagcaacttttgtccaggatggagccccagccatttccactgccacactggtcttaaatgccatgtctgttttcgcctgtttctgggtgccagtcttgattttctcggcttccaaaggaagctcagctgcagccctggggaccccagttcccggatgtggttgagccaggcacctgatcttcccctcagccaaataggagggggatgaggctttcaccacctttgcagcctgcttcacattcacggtggccttggccttgggtgggttctcatggatggagcctgaggtgttgggagttccggctgctaccgccacttggggtggagccttgacatttgccactgttggagaggccagacacagagtcttgaggatggtggccaccgagcgtaactgggctggggtcttggttatcatggctggcaggcgggtctggggtgagggcttggtcaccccaactgggctcctctgggatgaagtcttggacattgtggctgacagacatgtttgcaatgggtttttggctggggtggtgaccgggtgcatctggggtggggtctttgccatcgcaggccccgggcatacctggggcaggctcttcatgatggaagccagaagggaaacctgaggtcggttctttgccgtgatggtcgcagggcatgtctgccgtggggtgccagttctggaggctgtggggtgtacctggatcttggtcattgtgggcatggggcatgtgtgaggtgcagttttggtcactgtgggccccggatacatctgggctggggtcttgattattgttactttgggaactgggctagtcttgggtggggtggtggtcatcgtggacgctggatatgtctgtggcagggtcacggagaccactggatatgtctggagtagagtcttggtgatcatgggccctggacatatctggaagggggctttgggggtctctgctttcacagggccctgggtttgggctctggatggtctcgtaactgcctggtcataccttctggacaatggtgtctccggagccctggctttgttggtccgggcacttacacgtttggtcttcactgagtcaccctctatgtggacgaggcaggtgcttctgatggttctggtcagcaggcatggctggcattttgcgtccagactcactgggcagggaaatctgatggtgaccgtctggtgtggcaggaaggccagcccccggactctggcagcatgaggaccctgcacacagggctctggggtaccctgagctgctgggggctgcaggaggggggacgactggggtctgcagaggaccagattgtcacaggaagggaactgggtctccttgttcaccatgatgggcggggacagaaggcggttctcttccggatgctggaagcgcacctgctgtggggcgtgataaggtatgtccccctcctccgccctcgttttctttaccaacgacttgctggagtgaaggatgtgtctcttgttgaagcgccgccaggcctcctggatggccttggccgccatcatctgggaaatcagcttctgccggagccaatagcccctccagttggcttggatgagcgtggctgcacgggcgtgcatcatgtccatctcgtctaccaggatgttcttgaaggcctggctctcgaccacagcccggaggcgtgggacgcggcgggacgccgtcttgccttcggcaggctgttgcggaagatgctccttggacttgaggccctcgtgctggggctgtggaggcgctttctccattttgtccaggagactggggtgagcgggggctggaggatgcaccgcccactgggtgacaactggctcgtgaactgtagctaggcggccggctgcattgccttgattaccggacaggtcagctctgcctgtgggggcggcagggggtggtcagggtgtagcaggtcctgcaaacaagaggtctcctggctggggtggacactggccccccaggcccagatcttgttcctggcacgttgcgatcttccgcctccctttttccatccctccctctcccaagtggtctttgccatccttatatccacctctcatcaccctacggccacttcatcttggcacacagtgtatgacacctgaatgcccgaccacttacctgcttttcttttttcttttctttttttttttttttttgagacagagttttgctcttgttgcccaggctggagtgcaatgctgtgatcttggctcaccacaacctccgcctcctgggttcaagcgattctcctgcctcagcctcccgagtagctgggattacaggtgcacgccaccatgcctggctggctacttttctgtatttttagtaaagacggggtttcaccatgttggccaggctggtctcgaactcccgacctcgggtgatccacctgactcagcctcccaaagtgctgggattacaggtgtgagccaccgcgcccggcctgcttttcaaactttatcttggatgtaccctgggtttagcactgatcacaatgttttggaaatttcctgtttgcctctgtgtgtgtgtgtgtgtgtgtgtgtgtgtgtgtgtgtgtgtgtttgaaaaagagagagagagaagtgtggtgggggagattatttgcctctccccattgattgtgaatcctagaagacagagtcatttctgtgtccccatctcagtcatagagcttggttccaagctgtgaatgggtaggtattgggtggggggggcatcttgactgataaatggtgagtggattggaagttggatggacagatagatacaggactagatactgaatggatgaatcagtcgatgagtgaatggtagatgggttggaaagacagatgaaggtttggatgaataggtaaataaagctgatgaataaagtgttaaaggcaaattggcccggcacggtggctcatgtctgtcattccagcactttgggaggccaaggtgggcagattgcttggggtcaggagttcgaggccagccgggccaacatggtgaaacccgtctctactaaaaatacagaaaagtaggccaggcacagtggctcatgcctgtaatcccagcactttgggaggccgaggtgagcggatcacaaggtcaggagtttgagaccagcctggctaacgtggtgaaaccccatctctactgaaaatacaaaaattagctcggcatggtggctcgtgcctgtaatcccagctactcaggaggctgaggcaggagaattgtttgaacccggtaggcagaggttgcagtaagccgagatcgcgccacctcactccagcctgggtgacagagcaagactctgtctcaaaaaaaaaaaaaaaaaaaagagccaggtatggtggcatgagcctgtagtcccagctagtcgggaggctgaggcaggagcattgcttgaacccgggaggaggaggttgcagtgagccaagatcacgccatcacactccagcctgggcaacagaagtgaaactccgtgtcaaataaaaggaaagaaggaaggaagcaagggagggagggaaattaaagagagctggaaagactggtgaagagataacccaacaggaggtagactgatgggtggatgggtgggtgggtggattaggggatgggtaggtaaatggcatatggaaggatggaaagaaggaagaaaaagtggtgactgtggctttcagaagtaactaggatgcagagagagctgggacactgtcaagccaccctgatgcatagcctggagcacagcacacttgtttggcagaagcccctctcttcaggttggactagccagaccccttgcccatagaccatcttcttaccttgaagggtcatagatttggaggagtagcaggagaagaaggtgcaatctcagaagccagcctgcaagaggaggcagccttcagcctttcatccatgcaatatgcagcaacactgccctgggctggctcaagaccaacacaaaaagaaatgttaaaagcaaaaatgctaaattctaaaatttctaaattctaaaaaagctaaattctaaaaaaaaaaaaaaatgtgcaaagatgaggaaatttattccagtgttattttgtagctagaaatcaaacaaaacaactggaaataaccaaaacagtgattggtagaggttctgctacaaatgaatacagaagtatgttcaaggatgtttaacactgtattgtttagcagaggaaaaactggaagaaaccaaaattatcaatggagacaggcttaaattaatcatacaagggcatgatatccaggcatcagaaatggcgtccaggctgagcacagtggttcttgcctgcaatcccagcactttgggaggccaagatgggaggatcacttgaggacagaagtttgagaccagcctgggaaactaagcaagaactgtctcttaaaaaaaaaaaaaaaaaaaaaaaaaaattggccaggcgtggctcacgcctgtaattccagcactctgggaggccgaggagggtggatcacctgaggtcaggagttcgagaccagcctggccaacatggtaaaaccccgtctctactaaaaatacaagaaattagccaggcatagtggttgacgcctgtaattccagctactcaggaggctgaggcaggagaatatcttgaacctgggaggcagagatttcagtgagctgagatcgtgccattgtactccatctggggcaacaagagcaaaactgtctcaaaaaaaaaaaaaaaataggccgggcacagtggctcacgtctgtaaccccagcaatttggaaggccaaggtgggtgggtcacttgaggccaggagttccagaccagcctgggcaacatggtaaaacccgtctctactaaaaacataaaaattagccagtcatggtgacatgcacctgtagtcccagctactcgggaggctgagacaggaggatcatttgaggccaggaggttgagactgcagtaagctacgatggcaccactgcactcgagcctgagcgacagaatgagaccctatctcttttttgtttttaaaacagagtcccacccttttgcccaggctggagtgcagcgtcacaatctcggctcactgcaacctctgcttcccaggttcaagtgattcttgtgcctcagtctcccaagtagctgggatgacaagtgtaagccacggtgcctggctgagaccctgtctcaaaaaaaaaaaaaaaaagattgtgattaaagagtaagtataagataaaaggtaacctgggaggccaggcatggtggctcacacctgtcatcccagcacttcgggaggccaaggcaggtggatcacaaggtcaggagttcgagaacagcctggccaacatggtgaaaccccgtctctactaaaaatacaaaacttagccaggcacagtggcatgcacctgtaatcccagctacttcagaggctgaagcaggagaatcacttgaacccgagagatggagattgcagtgagccgagatcacgcaactgcactccagcctgggcgacagagtgagactctgtctcaaaaaaaaaaaaaaaaaaccaggcgcagtggctcacgcctgtaatcccagtgctttgggaggccgaggtgggtggctcacgtgaggtcaggagttcaagaccagcctggccaacatggtgaaactctgtctctactaaaaatacaaaaattagccaggtatgatggcaggtgcctgtaatcccagctacttaggaggctgaggcgggagaatctcttgaacccagtaggcaaaggttgcagtgagctgagatcataccattgcacaccagcctgggtgactgagcgaaactcagttcaaaaaaaaaaaaaaaagataaaaggaaactctatgtggtactttagggctgagggagtatccccaaaaaaggggcaaatttggagagcattcagacttccttggagaaagtatggtcccgcctaacaagttaacggagataattgctggatcggccaagccagagctggtctggagttgcaaaacaagcaaaaggcccaccctccagggtgcagatgtgggaacaggttatcaacagttggtgctctggatgtgcactggaaacctaagtgttgctggggcaggaggccttcaatgtgtatgggccaccgtgggggctctgttcgtttattatcatttatttatttatgatttttgagacagagtctcactctgtcccccaggctggagtgcagcggcactcagcatcttggctcactgcaacctccgcctcctgggttcaagcgattctcctgcctcagcctcccgagtagctgggattacaggcatgaatcccaccacacccagctaattttgtttgttttgttttgttttgtttttggagggacggggtttcaccatgttggccaggctggtctcaaactcctgatctcaggtgattcgcctgcctcggcctcccaaagtgctgggattacaggcgtgagccaccgcgcctggcctttttttttttctctctctcttttgagttttgttcttgtcgcccaggctggagtgcagtggcgcgatctcctttcactgcaacctctacctctcggtttccagcgattctcctacctcagcctcctgagcagctgggattacaggcacctgccaccacgcctagcaaatttttgtatttttagtacagatggggtttcatcatattggtcaggctggtctcaaattcctgaccacaggtgatccacccaccttggcctcccaaagtgctgggattacaggcatgagccaccgcgcccggccttaggggctctgttttttgtgtgtgttgagagggctgcagaaaggttttcaccaggtcaagactgcaaagtcacaggaccacgttctggatccagggctcgggcaggcttcacctggtgtcttcacacctctatccctaatgcctcaccagcgccctctattgagaaatcttagcattgtgctcactttttttttttttttgagacggagtctcgttctgtctcccaggctggagtgcactggcaccatctcggctcactgcaagctctgcctcccgggttcacgccattctcctgcctcagcctcctgagtagctgggactacaggcgcctgccaccacgcccagttaatattttgtatttttagtagagacggggtttcactatgctagccaggatggtctccatctcctgacctcgtgattcgcccacctcggcctcccaaagtgctgggattacaggcgtgagccaccgcgcctggccgagcattgtgctcactttaaacaagacataacgaaagaaattcctttgtttatcacatattgaaagggtccattcggagacaagaggcaatgcatggataattgacacacatatatttattatttttatttttttgagatggacggaatcttgctctgttgcccaggctgaagtgcagtggcacgatcttggctcactgcaacctccgcctcccaggttcaaagtgattctcctgtctcagcctcccgagtagctgggattacaggcacttgccaccacacttggctaacttttgtatttttagtagagttggggtttcgccatgttggccagactggtctcgaacccctgacctcaagtgatccgcccgcctcggcctcccaaagtgctgggattacaggcatgagtcaccatgcccggcctaattattattattattctctttgagacggaatttcacttttgttgcccaggctggagtgcaatggcgccatcttggctcactgcaacctctgcctccaggttcaagcgattctcctgcctcagcctcccaaatagctaggattacaggcatgcgccaccacacctaatttcgtatttttagtggaaatggggtttctccatgttggtcaggctggtcttgaactcctgatcacaggtgatctgcccgccttggcttcccaaagtgctggcgttacaggcgtgagccaccttgcccggcctaatttttgaatttttagtagagatggggtttgaccatatgggtcaggctggtctcgaactcctgaggcaggaaaatcacttgaacccgggagacagcagctctgggagctgaatgggcccattccaggggctgaggtttcatcaaccaaacggtgcagctctttagaggaactcaaccagaaggggtgagaaacgggattgtgggggatgagaagaaggaacaggggccccctggacacagaagccaagcgactggctcggtaattttgagtaaacccctctgagcctcaatttccctatctgtcacaagacataagatcaccatcctcaggttgccaaagagacacaacaggctcagctgggcgcagtggctcctgcccgtaatccaagcactttgggggaccaaggtgggaggatcgctgcagcccaagagtttgaaaacagcctgggcaacatgtctctatttatttaaaaaaataataataaagagacataacaggctctccatgatgtcccccatcacaggtgaacaaatccaccatcaaggctttagaggtccctagagcccctgctgtgaggggccaaggagctgacccatcatttgcagtcacccagaaggcccagaagggctctaaaggcactgggggccagaggagaacgacagggtcccccacgaaccctcgcaaacaagtcctccaccagccccactcacccgcccctgaagccaccagccccactcacccgcccccaaagccaccagccccactcacctgcccctgaagctaaacctagcagtctgaacggccagtcttggagccctggtgccgcagcagctttgtgactcaaagccaagttctggccaatccctggcagctcttagggggtggggattctagaaggcacagccagaggttggggaacaggatgcagggcagggccaaaggtcatggtggttgctacctacaccggctcatcctgagtacaaagggttctcagcacagagggaaccccaaatctccccctccatgtacctagaggcagtttcagtctttcatcccacgggcattttctgagcacctactatatgctggaatttgccccatgtctggggatacaaacaactcaaagaatttgaggctgtaaaatggctagatgggaagggaccaaaaagggggtgcaacgggccagtcagggttctcactgatgtcttgggtgtggctctgagactgcgggctccttggggtggggccggacttgatctcttgggatccccactgggcccggcaaaagtgggtactgaccctgagccgcagcgctataaggggaagtcaggctgctgtcctggatcacctcctggggctgggctggggcccagcatgagtcaccgctggctgggccaaggctgacacgcaccttggactcagtgcagctggctccagccaaagccagcctggcccagaagcctctgcctggcttccttggggagccgctgggggttgccgggacaagaaccagcaggggtgcctgacctccctctgcagcgatcaccccctccaaaaccttccctatactgtgggtgtgactttggacaaaatcagggacatggcagatggcagttgggtggggtttatatcctttgtctgttttttgagattgagtctcgctctgttgcccaggctggagtgcagtgctacgatctcagctcactgcaacctccacctccccgggttcaagcgattctcgtgcctcagcctcctgagtagctgggactacaggtgcatgctatgacgcccagctgatttatgtagttttagtagagataggatttcaccatgttggccaggctggtctcaaactcctgaccacaagtgatccgcctgctgcggcctcccaaagtgctgggattacaggcatgagccactgcacccagctcatcctttggatgtttcatcagaacaggtcccttctgtgctgtcaacgagctaaacacaaactgggagttctcagggcaattggagaccgtaggagcccagtaaggtgctggcctagcctgagggttactagggacaggcttccgaggactgtgcagctgaggctgggaggtggcgctcagctgcatgactgggggaagagtagctggcacagaactacagctgcagccgtgcaaagaccctgaggccaggaaggcaggatattgggaatttgggtggagaggctcctgaaaggagacactggccagcccagggactggtgcagtcaggactttttccaaaaaggtttcaagtaaggagtcagatctgtgatttagaaaaagcccttcacatcacagctcatgcctgcttgactcccccatcagactggagggctggcctcaactaggtgtcaataaatgctggggacgctgggcgcgatggttcatgcctataatcccagcactttgggaggccaaggcgggcagatcgattgagcccaggagtttgagaccagcctgaccaatatggcaaaacctcgtctctactaataatacaaaaattagtcaggcatgatggcaaatgcctgtaatcccagctactttggtggctgaggcaggagagtcacttgaacccaggaggtggaggctacagtgagccaagattgcaccactgcactccagcctgaatgagagaccctgactcaaaaaaaaaaaaaaaaaaaaaaaaaaaaaagaggccgagtacagtggctcaatacctgtagtcccagcattttgggagaccgaggttggaggatcacttgaacacaggagttcaaaaccagcctgggcaacatagatcccatctctacaaaaaaattatttaaaaattagtagggcggctgggcgtggtggctcacgcctgtaatcccagcactttgggaggccaaggctggcggatcatgaggtcaggtgatcgagatcaacctggctaacacggtgaaagcccatctctattaaaaacacaaaaaaattagccaggcatggtggcaggcgcctgtagtcccagctactcaggaggctgaggcaggagaatggcgtgaacctgggaggcggagcttgcaatgagccgagatggcgccactgcactccagcctgggcggcagagcaagactccgtctcaaagaaaaaataaaaataaaaattagtagggcatggtggcgtgcacctgtggtcccagctacttgggaggctgaggtgaggcaggacaatcagttgagcctaggaggtcaaggctgcagtgagctgtggtcttgccactgcactctggccaaggcaagagcgagacctcatcttgtaaagaaaaaaaaaaacaaacttgtggggcccagtggctcacgcctgtaatcccagcactttgggaagccaaggtgggtggatcacctgaggtcaggagttcgagaccagcctgggcaacatggtgaaaccctgtctctactaaaaatacaaaaaaaaatttagccaggcagggtggctcacgcctgtaatcccagaaactttgggaagctgaggcgggcagatcacgaggtcaggagatcgagaccatcctggctaacacggtgaaaccccgtctctactaaaaacacaaaaaaattagccgggcatagtggcgggcgcctgcagtcccagctactcaggaggctgaggcaggagaatggcatgaaccagggaggcagagcttgcagtgagctgagatcgcgccaccgcactccagcctgggagacagaacgagactccgtctcaaaaaaaaaaatttagctgggcatggtggcagacacctgtaatcccagctaatcaagaggctgaggcaagagaatcgattgaaactgggaggtggaggttgcggtaagccaagatcaggccattgcactccagcctgggcgacaagaggaagactcagtctcaaaaaaaaaaaagaaaaacaaagtacgtcctccacctctctgcagggctcctcagagtcctttcgccttagaccacttgggggcaggcaagcaagagacctgggtttgaatcgctgctctgccatttaacaggggtgttggccgggcacggtggctcacgcctgtaatcccagcacttcgggaggccgaggcgggcggatcatgaggtcaggggatcaagaccatcctggctaacacggtgaaaccccatctctactaaaagtacaaaaaattagccaggcgtggtggcgggcgcctgtattcccagctactcaggaggctgaggcaggagaatggcatgaacccaggaggcgaagcttgcagtgagccgagactgcgccactgcactccagcctgggagacagagcgagactctgtctcaaaaaaaaaaaaaaaaaaaaacaggggtgttgggcaagtctcaaaacctcccttccccttctctactaattgggggccacagtaggtaccatcattgagtgcggtcactgttgtccgtcccctgagcacctcccagttctgacttctgacctgagagatgttatgctggatgcaaacacccgcatctcacagcacaggatgtagaggccatcgggggaggaggactcgcctgagatctcacaaatgccaactggaacctaagctgggtcccggtctcccaaccagtgacactctgcccgagatgtggttcttggtctcttgtgtgtcaagacacccctgctctcccacctcagcctcagttcccttcagcaggttccttcaggccctgctgaaacgtctgcatgacctcccacaaggcaacgtgacagctaaaaaccaaaccctggccggacgtgggggctcacgcctgtaatcccagcactttgggaggccgaggcgggtggaccacttgaggtcaggagttccagaccagcttgaccaacatggtgaaaccctgtctctactacaaatacaaaaaagtagccgagcatggtgggcacctgtaatctgagctacttggaggctgaggcaggagaatcacttgagcccggggaggcagaggttgcagtgagcctagatggcgccactgcactccagtctgggtgacagagcgagactctgtctcaaacaaatgaaccccaacatagctgttggtggcaaggcctttctccatgaccaagggacggtggccattctctccaagtttcttcatctgtaaaatgggtacaattcagtggccctccctaacagggctggctaggtacacatggccaccagccctacttgctgtgtgacctcggccactaatgttcacatccctcagggtccccaatgagttggaagcccaaagcgcagggtcttaacagcaaagggcagagcaggcaggagaagcaggaagcctcgggtcaaagctctgaaagtgagggagtccaaggtcagactatctctgcacagtctccttaaaaggctgtgtgatgtcaagccagttgctcaacctctctgaaccttagatttcctcaaagtagggagtaggatgttgggaggaggaggagaagcgaacttcagggagatacttggaaaatcccagtcctggaggcagacctcttgggttagatcccacctgtgccaacttcctcctggtactgggtccatcagcttgtcctgggcctcagcatcccccgatccaccaaaagagaaaagcttacactgtaagccaagcactgctctgtaaacataaactctcttaatcgtcacaactttatggggcaagtttttcgactgttctccccattttatacggacaggcaaaccaaggaccaaaaggttaaaaagtttactaagtttctgtctcttccttcctgctttgggctggggctgtgccctttccacctcgaaatctctccttcccaaaaggcaagggggcattagctagttccaaacgcagatcaaagaccccaagacccctccccaacctggacatcagccggccccgcgccaaggcgcgtctagggggcgctcgctgcgcgccagatgtgcgggccgctctcagacacccgctctctgctccctccaacaaggggaggagctagggacagagggaggagagaaaggcgggggtgtaggggggaagcgaaccaggccccgcccagcccgccaggccccggcgggggaagaaggaggcggagagccgagctggcgtaacgagactttactgaaaacagaaaaccgggcgaaccaaggattacaaacaggaatgtggactcgtagcaaaacaaaacaaaacagaacaaaaaagggaggggggaccggtcgaaagaaccgaaggggggagcgagatcgaggaaaggggcggagaatttttttttcttcttcccatttctttaaaaaaccaacacaagaaaacacacacacacacaaccaacgtttgttcccgagtagaaacataaatagggcagaatcgaacactctgttcttctctcttccaaagaaaaaaaaaaaaaagtaaaagtaaaggaaaggcagggtttgaggctgcgccccctcggagcccccttccgcggcgcggtgtacaaaggggcagccgagacgcgcgggtttgtgcaacacggggcggccgcgcgggggaaagaggcagcgcgagggcgggggggtcatgcgctcgcccccccgggagcagggggtccagcttgtcgagtcctgggcaccctcggggggggggaatccccgggggccgcgccctctctgagttcctgggcacactcggggagggggggtccccagggccgcaccctctccaagtccggggcgcccacgacacccccccgcgagcccgccccttggggagggtggccgcgcatgcgccccgcgcgcggactcagtacgcgggcacctggtgctggggcagcagctggcagccgctgttgacgtggctgaggactttctgcttgagctgcgccacctgctcgcgcagcaggctcgccgtggacgccagctccgtgttctgactcttgagggtcttcactttctcttccaggcgcgagatgcgctccagcttgcgcttgcggcacttggaggcggcgatgcggttgcgcagccgcttgcgctccgccttgatgcgctcctgcgtgtccatgtcgatgggcgacaacggcgggctctcgccgaagctcggcacgtcgggcaccgtctgtggctcgtccttgagcgcagccaggcgcggcggccccaacgcgcctgggggtggcggcggcgggaagggcacaggttcggcagcgaaggcgaccgtcgcggcgccccccgcgcccccggcgccgcccgcgtagctgctcaggttcgcgtagacaggcgcttcgggcgcggccgccgccggggccagctcgccggggggcgcggagcccgtggccgtgcccgagggccccccggcggcggcggcggcggcggcagcggccgcgcccgcgccgagctggttctgcttgtgtaaatcctccagggccttgacgaagccctcggcgaactcctgctcctcgctggccgccaccttggggtagaggaactgtgagctcgtcggcgtggtggtgaccagcccgttggactggatgatgaggcgctcgagctcgggggaggccagcttcagcagccccaggtcgggagaggcgagcaggccgtcggggggtgccgcgctgggggcgccgtcggcgcgcaggggggtaggaggcggcgcggccgcaggcttgagcgctgccgccacctgctcactcaggctcagcgtcagcgcgtccttcttcatcatgctgccggccgcggccgtcgggggcgccccggggaacaagcggcccggggacgcgaagctgccgccgctgccactggcgccgccgcccaggccgctcagcgcctcatcgccgtagaagggtgtttccatcctccgcctcccccgccgcgccggcccgggggggagtggccgcggcctcccggggggcccgcgcccccccgtccgctcggccctgcgcccgccccggccgcggccgcagcgcccggccctccactggcggcggctcctgcgccgcgccacttgtgcgccctcttatagcctcggctcggcgcgatgagctcaccgcccccgttcgccattgggtgcgggtgacgtcgctcatttgcatggaggggcggggccaagccgccgacgcccgcccggccgccgttgccccggcgacgcgcggtaaacgccacaacagcgcgctgccttgtgggttgacgtcatgggggcggccgcgcgcccgggccgggtcaccccgccccgggaccgctgtgtacgaccgatctccccggcgccgcctccgccaaggcacgtcccgggtggcgtgatgggcccgggccaccaggcgcccgcccgccccgaggccccgccccgtgtccgcgcgtggggccccggccgggcgggggcgggggcgggggcggtgccggcctccggggactggagggggatggggtcccgcatggctaaataactccttggcgcctcctgctctgctgtgccgccagggcctcccctagcgcgccttctggagaggctttgtgcggatacggggctggaggcctggtggggctgtgtccgggggctcgccgggggtgtggggaggtctgcgttcctcaccctccctccttccttccctccctccctccaccccgcgtgtgattgctcaggaagagacgggaggggagaggagggtcgccagaagttgctgaaagcgcttggatcctgatcattttcactgagtgcgttctagaaccaggagtcctacttcctgcctttacagatgggaaactgggctcagagaggtggagtgaccatcccccgagagttagctaggagtcacagcagggcccgggctgtgactaggcctgagctcttgtccacccttagaaccctagaacctgggagtccaggcccctgcgcagccccttccttccgccgcccacgttttaaccccaggtctgccagggctgtgatgtcctgggcgagggtgcccaactccaggggctgggctgatgaggcaggaatgccgggtataattattacatgcttgttaccactatcatggctgttagggcttaatgagccactattaagactggctgggaagggggtgtgagggaggagagatggacccaccccaccaatactcacaagggatccttaggacatctggatctgacctacagcctctgcatgcacccctccagctccccacctctgtctgaatggagcccacaccctcctttccctgacctccttcccctcactctctctgatccttggcctcccagttgcaggactaatcgtacctctgggcctttgcacgtgctatgctctctgcttggtactcccttcccccagtgcaaagatgtgtcttcaggaagtgccccaccctcagactttactcctttattgtagcctctgaatctgccagaatgatggagtggaccatagtccctgaaggtcagggacattgcctatgctgagcctgctgacagggcctcgcatagaatggatgctcagtattaaaggtgaatgcggggctgggtgtggtggctcatgcctgtaatcccagcactttgggaggccgaggcaggcagatcacttgaggtcagcagttcaagaccagactggccgaaatacaaaaatacaaaaaaaaaaaaaaatacgaaaattaaccgggtgtggtggtgtgcacctgtaatcccagctactcaggaggctgagacatgagaatcgcttgaacccgggaggcagaggttgcagtgagctgagattgtgccactgcactccagcctgggagacagagtgagactccagtctcaaaaaaaaataaaaaataaaggtgaatgcaacaaaaggttgcttgtgtgggtggtctctagcctcagtttgtctgcctggccagtgggcatgcgttactccttttctatcctccttactcacctggctctgcccccaactggggcatgaaggccataagggaggctgtcctcatcaccaagagaggtggcctgtcggccacacgcggtgactcctgcctgtaatcccagcactttggaagtctgaggcaggcatttgaggtcaggagtttgagaccagcctgaccatcatggtgaaaccccatctctattgaaaataaaaattaggctgggcgcagaggctcacgcctgtcatcccagcactttaggaggccaaggcaggctgatcacgaggtcaggagatcaagaccatcctggttaacacggtgaaaccctgtctctactgaaaaataaaaaaaaaaattagccgggcatggtggcgggcgcctgtagtccccagctactcgggaggctgaggcaggagaatggcatgaacccgggaggcagagcttgcagtgagccgagatcacaccactacactccagcctgggcaacagagcgagactccgtctcaaaaaaaaaaaagaaaaaagaaaagaaaaaaaaattagccaggtgtggtggcaggtgcctgtaatcccagctagtcgggaggctgaggcaggagaatcgcttgaacccgggaggtggaggttgcagtgagccgagattgcgccattgcactccagcctgggctacagagtgagacactgtctcaaaaaaaaaaaagaagaaaaaaaaaataggctgggcgaggtggctcacacctgtaataagcactttgggaggctgaggcgggcaagtcatctgaggtcaggagttcgagaccagcctggccaatatggcaaaaccctgtctctactaaaaatacaaaaattagccaggcatggggagcgcaccggtaatcccagctgctctggagaaaggagaatcacttgaacccaggagatggaggttgcagtgagctgaaatcatgccactacactccagcctgggcaacagggcaagactccatcttaaaaataataataataataataataataataataataataataataaagacctggcctggcaggcctgggattcaaattgccagggcagggaactggaggtgtgggtttgttttgtctctagattggttaggaaggtgtctgtctgcctattggagtgtgtgtctgtgtgtgcacctgtgtctgtctgtattcgtgttgtatagacagacgcaggtacacacagatacatactcagatccatgggtctctgtgctctctagcccaggttctatcctggacaaagagatccctagtgggacaagatccagcccgcagacctgtagccagccctgccctgggaacccctctctgggtcccgtgcagtggggccagagtggaggagacggggtcatgcctctccctgaggcaggaggtgagtgggcggcctacagaggccctgccctgaacttgggcctcagccttggcagctggggagatggtctggtgaatggtaggctgagacagcctgagctgagtggagcactttcctgcaggcaggcaggtgagatacagaggcctgtcaacctctctgagcctcagcttttccttcatgaaaattgagcaaataaacctacctactttgtggagtatcgcgatttttttttttgaaatgaaaggcctcacatatttattactgaacccagccaacccacacgttcataacagattcagagaggaaaacacgtcgaactctccagatagtggtgacactttcagtttgatatgctaacgtgatcgtgaccttcagacagcataaatatgtgtgccatctcatgtgcaattccttatagacccagcttggttcttctccagtgtccttttggagttgtacctgattttatttccagttttcatccaaatccactggggaatgggacgattttgcttttgtttcttgtccaggaatcgcttaatcctgaaagtcttgtaggaagatatggcgagaagtggagtcaagaacacaccacgatggtgcagaaaggaaaagcattgcgatttttattggatttgaagaaatagtaaggggtcaggctgggtgtggtggcgcacgcctgtaatctcagcactttgggaggctgaggcaggtggatcacgaggtcaggcgttcgagaccagcctggccaacatagtgaaaccttgtctctactaaaaatacaaaaattctcccggtgtggtggcgcacgcctttagtcccagctacttgggaggctgaggcaggagaatcacttgaacccaggaggaggaggttgcagtgagccgagatcgcgccactgcactccagcctgggcaacagagtgagactccaactcaaaaaaaaaaaaaaaagaaagaaaaaacaaatagtaaggggtcaataaatgctttctatgattgtattatttgcccaaatgtaactgcagttctttggttttgagttctctcagcttggaatacccttacactcttggcgaactcctactcatccttcaaaacccaccaccttctccaagaaacccttcctgaccatgtcccctaggaccgtcgtcaatcctctccatctggctaagacctgtctgtcccttatctgtgtcttgttctgtctcctccatagaaggggaggggaggtcttcaggactggatggggaaggcctctcctggcccctaagtgtgggaagctgcctttgccacccccaagggctcctttcttcttttttttgagatggagtctcgctctgtcgcccaggctggagtgcagtggcttgatcttggctcactgcaaccttcccctcctgggttcaagcgattctcctgcctcagcctccctaaatagctgggattacaggcatgtgccaacacgcccggctaattttttgtatttttagtagagacggggtttcacgatgttggtcaggctggccttgagcctgacctcatgatctgcccgcctcagcctcccaaagtgctgggattacaggcttgagtcactgcgcctggcctccctttttctttctcttcgcattttctgttgctccacctcaatgccctttcctaccctctccttcctcctcccagccagagagccctctgggacaccccattcctgtccttccatttatcccagccctgacaccacagcagctgttggtccagctctgttttcccagagtgggggttcctccggggcagatctgaagccactttggacatatggggcggagggtgtctctaacgccatcagctagtcccatacaatgaactagagagaactttcattcattcaatccacatacactgattgagcccctactgtaagccaggggaaagggcacacatgaacaagaccaacatctgcacctttgtaggtccccacaccaagggagagccagaccggcgcagttttcaggagaatcaatggtgtccccgccatagatggtagtggagggggctgatattttagagtttgggtaatctgggaggggtggcccaggatgtaacaccaagtgacagacaagctggacttaattgccaattattgggggatcagagggttccggtaataggaacagccagttcaaaggccccggggcaggaaccagttggacacatttctagaaggtggggaggcaggtgggactggattgggaagccagtgagtgccaaaggaagagaaggggagtgccgaagcctccacctctgctcaggagggatttacccccaaggcaatgaaagttgcagatgaggttggggcaacactagggcttggtccgggactctgcattttcacctttatctcagcagcagctccacgagtggtgagggacgttatcccacttctcagggcagtgtctggagggggcgcgcgacgtgcccagagtcgtacaggccaggccagagagaaccctgccctccaagcagaagccgaacctgacgccccgcagccgccggggtttgaatcgctgcggctgtagtccttccccagcgcagagatttattgtttaaagcaacctgcaggccgggcacagtggctcagggcagtaatcccagcactttgggaggccaaggagggagggtcgcttgagcccaggagtttgagaccagcctgagcaatctagtgagacctcttctctacaaaaataaaaaagttcgctgggcatggtggtacacgcctgtggtcccagctacttgggagggtgaggtgggagaatcgcttgggcccgggtaagttgaggctgcagtttaatttttagtctttatttgaacacccagaaaccaaaaatcacgttgataaatcggaaagccccaaagaaaaccgagttaagcaggcagccgaaggggtgaggtggagccaggcactcacgaccccacagcggggaggtggggcttgtgaggaccctaatccagcgcttaggacccttaggctcgcagaggcgggacttgcagggaaagtgccccgactgccggacccccgcagggcggtcgggagtggggcgccagactcgggctgggggcgctgtctggcccgcacattcctgaggatcaagttacccgagaaggctgaggcctctctgttcccctcctgccaggcttccgccctctccaggagcaggaaccgcagtctgtccccagtccagcgcaggtgtctgcccagcctctcggaggggacccaggccctgccctctggactggcaccggatccctcctgcctcataaaaccattttacagatgaggaaactgaggcacagccccccttcagcattgatggaaccagattgaacctggctctgccagctttatgaccatttttactaactgggcaggcctagaagaatggttcagtcaagtgtttgttgattgactgaccatctagaatcagtctccaaagcctcttattatagcacaaggagaaaagaacttcccataccacttaccctcctaccccaccctaggacagacaggacccctgcacttatccagcatgcatttaatgtgcacttcctgtatgcccaggcctgggttaggccgtttcacaggtagatactggagaaccagagggtttggggatcagaaggtagtgaatttgctttctttagaccaacttcagaaattggtttgggccaggcaaaatggctcacccctgcaatcctagcactttgggaggccgaggcaggaggactgcttgaggccaagcattcaagaccaacctggccaacataacatgacgatacccccgtctccaaaaaaaaaaaaaaaaaaagaggccaggcaccgtaactcatgcctgcaatcccagcactttgggagtctgaggcgggcggatcatgaggtcaggagatcgagaccatcctggctaacacggtgaaaacctgtctctactaaaaatacaaaaaaaaaattagccaggcgtggtgggcaggtacctgtagtcccagctactggggaggctgaggcaggagaatggtgtgaacccgggaggcggagcttgcagtgagccaagatcgcaccactgaactccagcctgggtgacagagtgagactctgtctcaaaaaaaaaaaaaaaaaaaaaaaaaagataaattggtttgtagtctgagcagggtggctcatgcttataatcccagctctttgagaggcagagacaggaggatctcctgagcccagaagttcaagagcagcctgggcaacatagcaagaacccatctctacaaaaagatagaaaaattagctggttgggaggctgaggcgggcggatcacaaggtgaggagatcgagaccagcctggccaacatggtgaaaccccatctctactaaaaatagaaaaattagccgggtgtggtggcgcatgcctgtaatcccagctactcaggaggctgaggcaggagaatcgcttgaacctgggaggcagagattgcagtgagctgagatcgtgccactgcactccagcctgggcaacagagcgagaccctgtctcaaaaaaaaaaaaagctggtttggttttttgtttcttggttgttttgggccaaactcacataccatcattcatcgattcaaccatgcttttttttttttttttttttttggagacaaagtgtcactctgtctctgaggctggtgtgcagtggcacgttctcagctcactgcaatctctgcctcccaggttcaagcaattctagtgcctcagccaccagagtagctgggattacaggcacatgccaccacaccaactaatttttgtatttttagtagagatggggtttctccatgttgaccaggctggtcttgaactcctcacctcaagtgatccgcctgcctcaacctccaaaagttctgggattataggcatgagccactgcgcccgacgaccatgctctattgagtgcccgctgtgtgctgggcaggtgggttctcaccgcccagaggtgatgttctgggggactggaagcaaggtcattttagagaagcatgctgtaggttggtctcacgattttcctttaagttggcccccttttctgtttttacttcagtaaatacattttaaaagggaaccttcatgtcaccaccaagaatggaaaaccagtttctcttgctataaatagaaggaaaccaaaaaactatgaaatgagagcaaagtcaggcattcccacctcaggaacactcagggctggggctggacttcgaatgtctgagtcttatcaaaggcagggaagccccaagcagaagggcaggaggggccacagggacccacttggcagatgctccagtcccgtgggtcccagcacacagtaggtgcttgatgaatgtgtgttgatctgttaacatgcaacccattattgtaggtgcccccccccaccatgatgtgtgggttttgcctgcatccgaccacatactcgtggcttttccaggtactgagccatttccccgctgacagactgagggcagggtggtgcctgaatggggaggggtgggggaggtggcaggcagctgcctcttgggcaggggaccccacaggggcctctctggggaggcttcggtttggtttggtgacatgccaggatgcagctctgggcaaacgtttatttgcagccttggggctgtccccacccacggtcctgtgggcccctgacgtctgtccacactgagatgtgggcccctgtggcccgccgccctccctggctgtctgtggtgtgtgaatcaatgaatgagtgaatgagtaaaggaatgaatgcaataagtagcataatggatgagttcgtagaataatgaatggatgagtgaattaatgaatgagtggaagtattcatgctgccaagatgggaaacccattctccaggtattctttttttttttttttaagacacagtcttgctctgtcgcccaggctggagtgcaatggcactatctcggctcactgcagcctccacctcctgggttcaagtgattctcctgcctcagcctcctgagtagctgggattacaggcgtgcgccaccacgcccggctaatttttgtatttttgtagagacgggatttcaccatgttggccaggctggtctggaactcctgacctcaagtaatccgtccgcctcggcctcccagagtgctgggattacaggcgtgagccatctagatatgctttgtccccttttttcggatggacaaactgaggctgtcagccaagaaaggcttcagtatgtggaaggcagattcgaagccagttggccctgcacatcgtgggctgcatttctgcaccaagactgggggttcctggagcgagcttaggggtccggactggtgcagacggggcgctggacctggcccccagccagcggaagggatctgggccccagatggggagtagatggaactggaggcaaggcaggcggcagggggtgaagaggccgctgccccaggctgcggggatggggaggcaccggcagggtccgcgttgattcagaaaggaccccaaggaaggagcaactttgggggaccccaaagttgtctgagtggtatcaaaggccgtgcacatggggcccttaagcgctacagcaggggcaatagtggagagaccccacgccttcccgcctcccgctgcccccgcatccccttcctcccgcctcccgcctcccccctgctcctcgcctctcgctctcccggggaggaagtggcgagaatgcgggggtgggcaccctattctcacttcccctggggaagggcggggcctgcggggtcctctccgccgccgggagacggcatctccgcgtacaggggtgggggcggggagccctaggagctgggcaggcgctgctcagtccctggccaggtgacgtccgtaagtttcctggtcttcgatggttctcgaatgaaaaatggggggaaagacattgagttggaaacagcgagttgttggggagagaggaccccaccccgggccggtactagcagccagacacggacacgccctgccccggaggggtcagggccaggccgaagggagggaagtcgcagtaaacacagggttgggttggggcgggaggcgcattccaggcggagggaacggcgcgggcagaggcctggaggctggtggaggcctcctgcctcgcctagctgcggggtcctcagcgtgtggcccctcccctaatgggagggggggagaaaggatccggggggagaggtctcggagctgtcggcggcagtggaagagttaacttcccggggctgccggaccccgccgcgagctggcgggtggcgtcagcgccaacgtcagggcgaagtggtgccgcgtagacgcggacgcttcggccgcccggcccccaccccacgcggcgctggaggccgcggggatgggggcgggggcggtcggccctgcaagcaatttactgggctctgtgcagagagggaaattgaggcacgggaacggccgtggcctggctggtgctaagcccgctagcccgcgtcccacactaccgccccctcccagctcctccaggtcgccggacgacctggagctggtttgggcttgttttccattgcgcaaatacctgcgaataaacgtttgccccgagctgcgacttggcacatcaccacctctgcatggcctcagtttcctcaaccggataatggggagagttgacatttagtgtgggcgctgggttcggccttgaaaagggggtgtgggaggggactgcaccccaagaaagaggctggagcggggacacctgcgaggctgtctgtgaattccgggctggttctccagccccctcctctcctcccgtcgctcactcccctcctctccctccccttcctgcttcagcttcccctcccctcttccttatccccttctccctcccgtctcccccgatctcctctccaccccctctctccctttcccccgcccgcccagcgaggccgccccaccggactgctaattaaatgcagagctggggggaagggacggcgcgtggttaaccccttccccgccggggccctgaaccggggatggggaagggtgtccgccaccggaatttcctcccccccaggggcaggccttaagctctaggacaagcccatttattgagtgggtatatcgaggccaaaggaacggccccaacgttctgggtgaggctgtactaaatcgggcctcctgattggagggccagagcttcgagatagcggaagagaaaagcaatatcgtggcttggaaataaaccaagagaaaaaaaaatgagttggaaggagagacagcgggagagggaggctggaaaaaaatctaggagcaagacagagacagagagacaaccaggtaagggaggtggagctccgggtgtggcctggaggcacccaggcaggctcccggtaggaggcggcttcctggaggaacctgtggtggaataactcctggccctggtgttagcctccaggcctggctcacgcactgactgctgacttctgatagggccttgtggcctgaaaggaaggtcatgcctgcctttggagccatcggtcaacccaagtccccgccctgtccctgaaaacatcagagaggagcccagcgaagcgaagtgtgggctatgtgctgtgaggtgactcagtggcccctcattcttgggacgggaacaactgaaagaagtgaatgatataaagtcaggtggtgagaaagcaaatgacagcaggcggagggagtgtggggtggggggggccagaggatccatgataccagcagcagggccaccatgaggatgccccagggaagggtgttcctgaaagctggagtagcacgtgcaaaggccctggggaggaatttgaggtatttgtttgtttgttttttgagaggagtctccctctgtcccccaggctggagtacagtggtgcgatctcagctcactgcaacctccacctaccaggttcacgcgattcttctgcctcagcctcccgagtagctggaattacaggcgtgcgccacgatgcccagctaattttgtatttttagtagacagggtttcaccatattggccaggatggtctccacctcttgatctcgtgattcgtccgcctcagcctcctaaagtgttgggattacaggcgtaagccactgtacccgggctgaatttgaggtgtgttaagggaacatccaggaggaggcgtggcgcagggtgaggagagatggaggattacaggggcctccagatcctaagcagggagggtggggggtggcttgagtccttggccagcccaggtggagcctgtgactgctctccctgcctcacttttcctaccattatgcatgctccagaagcagcaggggaggctttggggatgtggaggttgcccagggtcacagggacccctgttgtgccctccgtcagtgcccctctggcctccccacaccctctgtggctccctgctgtggccagtcttccccatcatcgcccctggctctcttctctcctgcagtccagccactcagcccttgtacatgtccctcatctgttctcacaatgcccaccccaggtgacaacatcctcccaagcccccttcaggagatggtggggctgacactaacaggggagggggtgtagggaaggtgagcaccctggcccctgagtgctgcacacaaactgtgtaaaaatagctgctccccctgccccctgtgaggaggcggctgtgacggtggtggctgcagtgacggggatgtgcccagagaagcatccggcagggccagttgccatggtgatgctgactcagcggcagaggcaggtagcagcatctggtacccggccggcacgcctctgcttggcctacgctcatagcaccctgtccagccccaactttccagcctccaccctgggggtgtcttctgaggctgcagaggggtgggtgagacctcgggaaggactggacaagttcctccaccagacaccactcagtcatctgctggaaggtgggagacgctgcttctcatggagcggacctcagtgtcaggtcttcctccctctatcagccatccgcccatctacctactcacccatccatccactcatccaccatccactcatcccccatccatccaccatccacccatccatctaccatctgcccatctaccatccatccacccacctgtccatctatccacccatccaccatccactcatcccccatccatcatccaccaatcagtccatcatccacccatccatccaccatctacccattcatccatccatccattcctccacccagcggccatccatccatgcaccatctacccatccaccatctgcccatccaccatccatccatctacccaccatccatccatctacccacccacccatgcatccaccatccacccattcaccatccacccatccaccatccgtccaccgtccacccatccaccacctaaccatccaccagccatccatccacctgtctacccactgacccatccatccaccatccactcacccacccatccacccatccatccacccatccacctatctacccacccacccatgtatccaccatccacccattcaccatccacccatccatccaccatctacccatccaccatccatccaccatccacctaccatctacccatccaccatccatccaccatccactcatccatctaccatctacccatccaccatccatccaccatccactcatccatctaccatctacccatccaccatccatccatccatccacctatctacccaccaatccatccatccaccatccactcatccacccatccatccaccatccacccatccacctatctacccacccacccatccatccacccatccatccacccatccacctatccaccatccacccatccgtccaccatccacccttccatccaccaatccacctattcatccagccacccatccacttaccacacacccacccatccatccattcctgtgttcatccattcactcaacatttttggagcacttaccgtgtactgacatccttctgggcacatggtggttgccactgtcgatgcaggcagggtatcagcagtctggggtgcagggacttgggtgaggacaaggcctccttggctacttggagccaggccttgagatgctgaggccctatctcttccttgttctcctagtcttgctccctctctcttcctgcatctctcaatctctctgttttcccatctgagtccatcttagatccttccccatatccccaggccccccagcagctgccgtctattcccctcttcttctccccactcacttgttccatgccagctttcccttgggtacagctatgtattcccacctcggggtctttgcacatgctgttcccactgtctgggagactcactcacctggaattgatcatatttaattcttggctggctttctttctttctttctctctctctctctttttttttttgagatggagtctcactctgttgcccaggatggagtgcagtgacgcagtcacagctcactgccccctccatctcccgggttcaagcgattcacctgcctcagcgtcccgagtagctgggattacaggcacacggcaccacaccctgctaatttttgtatttttagtagaaacggggtttcaccatgttggccaggctggtcttgaactcctgacctcaggtgatctgcccaccttggcctcccaaagtgctctgggtttaccatatttaattcttgccttccttaatgtctgcctctatccccatccccagagtataaaggccaaagagctgacctgtggttctttcagggacctatttgtgccttcatatctccaactacgaaatgggtaaatggacatggtgctagcaggatgacctcataactggggcaggggttgggaggaagcccttagacctgtgcccactgcagattaaacactcagtaaactcccttccttggaaacagcccaaatgtccatcagctgatgaaggatcaacaaaatgtggtccacccacacaatggaatatgatgcagccacaaaaaggcatgaagcaggccgggcacagtggctcatgcctgtaatcccagcactttgggaggccgaggcgggcagatcatgaggtcgggagttcaagaccagcctggccaacatagtgaaaccccgtctctactaaaaatacaaaaattagctgggtgtggtggcacacatctgtagtcccagctactcagaaggctgaggcaggagaatcgcttgacccgggaggcagaggttgcagtgagctgagatcgcaccattgcactccagcatgggtgacagcataagacttaagactccatctccaaaaaaaaaggcatgaagcactagtctgtgctaccacgtgcacaaaactcgaaaacacgatgctgagtgagagaagccaggcatgaaaggccacacagtgtgagattccattgatatgaaatgtccaggacaggcaaatccacagagacaggaagcagcttcctggttgccaggggcttgggggaagggaatggggagtaactgctgatggggaccaggtctcctttggaagggatgaacatgttctagaattagaggcgatggttgcacaacagtgtgtgtgtattaaatgcccctgaattatacactttaaagtggttcattttatgttatgtgactcctgccttactttattttaattttttgagacagggtttcactctcttgcccaggctggagtgcagtggcatgatcttggctcactgcaacctccgcctcctgggatcaagcagttctcctgcctcagcctcccaagtagctgagattacaggtgtgcaccaccacaaccagctgatttttgtattttagtagagacgtggtttcaccaggctggtcttgaactcctggcctcaagccatatgcccacctcagcctcccaaagtcatggctcccatgagccaccgcgcctggccttcaatttattttttagagacaaggtcttcctctgtcgttcaggcagaggtcaaaccgtgcagtggttcaatcttggttcactgcagcctggtctccagggctcaaccaatcctcccacctcagcctcctgagcagctggtacttacaggggccacgccaccatgccaggccaattttgtttattttttgtagagatgaggtttcactatgttgcctaggctgctctcgaatccactttcctggattcaagcgatcctcctgccttggcctcccaaagttctgggattataggcgtgagccaccaccatgccaggcacctcaatttttttttttttttttttttggagacagagtttcactctttttgcccaggctggagtgcaatcgtgcgatctccgctcactgcaacctctgcctcctgggttcaagcaattcttcttcctcagactcctgagtagctgagattacaggtatgtgccaccacacctggctaattttgtatttttaatagagacggggtttctccatgttggtcaggctggtctggtctcgaactcctgactgcaggtgatccgccggcctcggcctcccaaagtgctgggattataggcgtgagccaccgcacccaaccacctcagttttttttgttaagtacagtacattaggtaaaaacgaaggaaatctgaataaagtagggaatttagtcattacaaacaaaacaaaactgcttcttaagtggttcagggaggttggttctctgaaggtgtctctaggttgactcatcctctctaagggaaaacagagggccagggaggccctcacatctacagtgtgccagcccttgcccggtacccttacccttgctttttgtttttttttgagatggagtttcacgttgtcactcaggctagtgtgcagtgccatgatctcggctgactgcaacctctgcttcctgggttcaagtgattctactgcctcagcctcccaagtagcttggactacaggcatacacagccacgcccggctaatttttgtatttttagtagagacggggtttcgccatgttgtggccaggctggactcgaactcctgacctcaggtgatccgcctgcctcggcctctcaaagtgctgagattacaggcgtgagccactgtgccctgctccctcgccctcactttgctcgccagccagctgactgccttttcaacacacccagcacacactttcttcagtgccttgacacctgccattctctctaattggaagcctcaggtgatcgagaaacgctggattccaccccagcaggtggaaccgaggtacagttctgtgtgctctgttatccccaccttccttaggccaccagaaaggtcaaggtgcttggtggttaggacaaagttgaccgcaccttggggccacagaggccgttgaatatgaccagggaggctgacagcctgagatgacagcagggtgtgagggtatcttggagggcacagtgcacacccctctcccaccctgggagggagaggaccctataagttaagtggggtctcgaagccagtgggagggtgaggaggtggaattcagaccagctgggggctctgtcaaaagggcctgcttctggctgcctcaacaatgcaaacggcaagaactttttttttttggtggggggggggtcttgctttgtcacccaggctggagtgcagtggcgcaatcatggctcactgtagcctcaacctccctactcaagtgatcctcccccttcagcctcctcagcagctgggactacaggtgtgtaccgccgtgcttggctaatttcatttgttttgtagaggtagggtctcactatgttgcccagactgggatcctgggctccagccatccgcccgccttggcgtcccaaagtattgggattacaggcttgagctactgtgcccggccaagaaccatttttaaatctaattaatttttttttttttgagatgaagttttgctcttcttacccaggctggagtgcagtggcgagatctcagctcactgcaacctctgcctcccgggttaaagcaattctcgtgcctcagcctcctgagtagctgggattacaggtgcctgccaccacacccggttaatttttttgtttgtttgttttggtttttttgagacagagtctcactctgttgccaggctggagtgcagtggtgtgacctcggctcattgcaacctctgcctcccgggttcaagcaattcttctgcctcagcctcccgagtagctgggactacaggtgtgtgccaccaggcctggctaatttttgtatttttagtagagacggggtttcaccatgttagccaggatggtctccatctcttgacttcatgatccgcccgcctcggcctcccaaagtgctgggattacaggtgtgagccaccacgcccggccaatttttatattttttagtagagacggggtttcaccatgtttcccaggctggtgtcaaactcctgacttcaggtggtccacccacctcagcctcccaaagtgctgggattacaggcataagccactgcacctggcccatttttttaatttttaattttttttcccaagacagtcttgctctgtcacccaggctggagtgcagtggcatgatctcggctcactgcaacccccacctcccaggttaaagcaattctcctgcctcagcctcccgagtagatgggattactggcgctcaccaccatgcccgcctaatttctgtatttttagtagagactgggtttcaccgtgttagccaggctggtcttgaactcctgacctcgtgatccgcccgcctcagcctcccaaagtgctgggattacaggtgtgagccaccacccccagccatttttttaatgtttaaggaaaactgctgggcagtgaaggtctccccagacaatgtcactgagccccggcctccccaacctggtctgagatttcagggggtttcagaagaagctgacctttgagaaggctctggggccaggatgtctgagttacttgatgctggaggggtggggcaaggagggtctggccctggtggtgcagaggaggggagatgagggtggggaagacacttgaggacgtgaggagtatttttaggtgctgaatgcagccctgaaatatttccacggccactcccgagagcgagctgggtgactatttcggtgcctggttccagtggaggcggggcaggggtgagtcactcactgcccagtggccgcagaggccaggcccaggctgggaggcggctcgaagggcaggatcgcaggcctgcaaggtgaacggtcactggcctggggccaggcttcctaagccagcctccagggcacagaggacagcggcctttctattccccatggcactggccaatccagaggggccactgcctgggtgccctgggacaatgagctgctcacgccaaccccatagttgtaaagatggagggtcccccgtgaggttctggacaccccacaggtgctaggcgagatgccatcttagattatttcaagcatttattgagcacttgctgtataccaggccagtcctaaaatgattactggcatcctcccttcatgcaatctgcccaataacccccatgaggtagagctgctgttatccccccgaccagggaggaaactgaggcacggtagggttaagccctccaggcacctaactatgtgcctcaaatcctgtccctcagctgatgttacaatcaggggagtgagttttaaagcagcagccgatcttgcttaccccccacaccctattcccaaccaattttggggtcctgactgtgcctgagctgggagaaggtcaatggatccttcaggtttaaggaggcagtggaaagaggaggtcaccattgctgtgtgacctggggcaggttcctcaccctctctgtgcctgagcagtgaatgacgatgccaccctatgggtgagttccggagctgcctggcacacattcatgatagataaacaatggttggctgagcatactggctcaggcctgtaatcccagcactttgggaggctaaggtgggaggatcgtttgagcctaggagtttgagaccagcctggacaacatggtgagacccctatctgtaaaaaaaataaaaaacaattatcggctgttgcttggattgtgtgcctgtcctgagccttcatttctccatctgtgaggaccctcggaggtgctgggttggaagtggctttggaaacccacggggctgagcggcaaggctgagtgggagctcggggaatcctcgccctcactcgaagtctccttgagaagaggctgatgcttggccgggcgagatggcttacgcctgtaatcccagcactttgggaggccgaggcgggcggattgcccgaggtcaggagttcgagaccagcctagccaacatggcgaaatcctgtctctactaaaaaatgcaaaaattagctgggcgtggtggcggacgcctgtaatcccagctattcgggaggctgaggcaggagaattgcttgaacctgagagacagaggtttcagtaagtggagatcgcgccactgccctccggccagggcgacagagtgagactttgtctcaaaaaaaaaaaaaaaaaaaagaagtggctgatgccaagcgtcaggaacagatccctgcaagtgcccaccccagctcctgtaggggcttcttttttattttattttattttattttttcttttgagacggagtcttgctctgtcgcccaggctggagtgcagtggcgtgatctccgatcactgcaagctccgcctccctggttcgcggcattctcctgcctcagcctcccaagtagctgggaccacaggcgcccacccgccttgccttcccaaagtgctgggattacaggcatgagccaccgcgcccggccctgtaggggcttctggcctgagccctgaccccctctgccccttccccacagaagttcagaggctccgtgcttgcagttcctccacctgttccggctctctctgtgtggccagcagcttcttgtccactcgagacttggtttgactggacctcctcttaaatttttaaaaaatttttaatttattattagtagtatcatttttttgagacagactctcgttctgtcgcccaggctggagtgcagtggcgctatcttggctcactgcaacctctgcctcctgggtttaagcaattctcctgcctcagcctcctgagtagctgggattacaggcaccacgtgccaccacacctggctaatttttgtattcttagtagaaataaggtttcacctcgttggccaggctggtctcaaactcctggcctcaggtgatccgcctgcctcgacctcccaaagtgttggaattacagttgccgctgtgagccacagcacccagccggcctcctcttgctctgtggaaaggaggtgccacctcggggtcctgcacttcctgggcaaggccagctggtcagcctaggccctggcagcctcctcctccctgccctgaggccccagcactgcccccttcctgcttccacccctgcttctgactgttccagaaccctctgtggctgcttctcatgtcactcagggcccacatcctccccatttcctgcccttctgtttgctcctgtgtcccctgggcacagggcctttgcacgggactgtcctcctgacccctgctggtccagaatgttctttcccaaggtggctggctccctcgtctctcaggcccttcctgaatcttcagtgtccttctctcaccttccctgaccacctcttcattcacctcctcacgagcccgccctgtttctggtttctttttcttttttttgagagtctcgatctgtcgcccaggctggagtgcagtggcgcgatctcagctcactgcaacctccgcctcccaggttcaagcgattctcctgcctcagccttctgagtagctgggattacaggtttgtgccatcacgtccggctaatttttgtatttttaatagagatggggtttcaccatgatggccaggttttgaactccttatctcaggtgatccgcccacttcggcctcccaaagtgctggggttacaggcatgagccactgcgcctggcctggtttcttctttttacagcatttatgcatttgatatgcatatgcttgtggctggctcactcctgtggaagggaaggattgccggggctgtgtcaccagcacctgggacaaggcaagtggccctagtgccaggctcgtgccaggccctgggctccaaaagaagaaggtggggagggaggtgacagggacacaggccatctgggggtggctgtcagagtagtgctgggaacagcaggtgaagcccagaggaggagaggaggaggagagagaggagggggatgggggatgggagtgggggatgagtggaggaggatggaggaggaggggaatggggaggaagatggggagtgagaggagggggatgggggaggagaaggagaaggaggaggaggaggaggagagagggatggcttcccacagctgcctctcgggggccactgcccaaggccagcctctgcacttttgtccctgaagcgggtgtttggctccaggatgaggtggcgtcagcagccgacccgggcctgtcgcactctggcgggggactgtgggctggccctgcagagctcagcccccggctgagtcacagcacagcgccaggcgtgggcctccctaacagaaagcaaactccaggcgagaaggtctgggggcgggtggggaccatctacgataaaggcagccccagttgggtgaggagggcacagaccatcggagggacagaaagacctggaagccttggatttaggaactagactggtgcttttggtttcttttcttgttgagggggctgaggatgaggctttgtgaaaccaaccaggaagaatgaaacacagagctggtccgacacccagctcgagggaggggggccggaagcttctggaagttggctgcccctaagcaggggccactctagcccacaaggccaagttggcagaggcagacgaggggactctgcggctcaagtcacgggccaggagcccgcagctgccgggctggaaaggtcagagccggctctgcgtctggctgcgccggcaagaagccacaattacgcaggcaaaagagcccggggattagccccagcacctgggaccctgaatggtgagaaggcacctagggggtgttggaacacattctgagttcagagcctggtcagggagaaaaaaccaaacggagatcaggaaggggaaggggccttcgagggctttcccatcccaacttcccaggatgcctgaccccagagctcctggatttgatccacgcctcgtgacacacacaacccctgggaggaaggagcccaggccccttggagagccccagaggcctctaagggccggtgagtctaggacatggggcaggagctgcaaatggggcctccctgctccccacccttccttccctcctcctctaaacattgccccacccacctcgccctgtgagcccagccccctgcacggcccacactgtaggggcatggggtgtgccaagagatgctcctgtcgaccaggcgcagtggctcatgcctgtaatcccagcactttgggaggccaaggcgggaggatcacttgagatcaggagttcaagaccagcctcgccaacatggtggaactgtgtctgtactaaaaatacaaaaattagccgtctgtgttggtgcacacctgtaatcccagctactcaggaggctaaggcaagagaatcgcttgaacacacgaggcagaggttgcagtgagccaagattgtgccactgcactccagcctgggcaacagagcgagactccgtctcaaaaaaaaaaaaaaaatgctcttgtccaacaggcaggtgggtgccgtgggccggtgcatcccaaggcttccaggcccgggcccccaactgctgcccctgcctgtgttgagggggcgggtttgtgaggttcagggcaggccacatcctggaccccacatgccccatctctaaccatcaatcaagtgccgctgtggcggagaggattcaggcgactgcagatatccatccctgtcccccaccccacacacaaggagaacatcccaggcgaggacattgtaaatgcaaaatctatacgatggcaagtaactctgaagactcaagaaaaagagttcctcacggacgggaccttttattccaatcacctctcaaaataggtctccgaacgaggaccctgaagagaaggctatgcagggggacgggccgctgcctggctcagggcttccctctggtttcttcacggtccacagatgctacccggagcctttctcgaaagcgctgactcagtgtctcaggtgcgcgcccgaggagtggcaaacccggcctggctcagaaagggggcaggagcctcgtgagaatcttccatgagcatcttccgaggggattcctgtcctgtcttctctgtgtgaacgccagtgtggacagatgaggatagatgatggagtccaggccacccaggagggggtgatggggaccatgcgtggcccctgcctgggacttccctccccacacaccccttggcattaacgtctccacagaggggagagggttataggacaacctggtgtggggggcgccggggactctcaagagcccccactgtccagatgctggtcttgccttttgtaaaaggacatcagtgcctcactgtgccgctgacacctggtgagaactctcaaaaggaagcttcccttacgggaacggggatttcctgagagtccagcgatggacagagggcaggagacccgctaggtgcacccagaagctcaaaaggaacagtggatgtgcagtgtgtagttttatttgtttttatttccataacacaagagaggaagcgaagggccagggcccgaggcatcccctgcacggttcgaaggctttcaaccgtcccgggtttgttttgaaggcaattttggggccgcgcccaaggaaaccctgcaggctgtcagtcccagcatgaacagcttaaaataaaaatctcccgtctggttgctgctcggagaggctccaagaaatgcaaaacaaacccgcctggaaaatgctgccctgagaaccagagcgagggcttgaaagatgccttcaacacagactcttctaggaatccagccagttttgggacggccgtttcacaaaaccaaaaaacaccaagtaacatttctaaccggagaattgccggttttagcaagaaaaaggggcttcacctaaaagggagggtcacaaaacacgaagggggttccccctggcgcctgcctcttcctttctgagcagatccgtccgagactgtggagcggaatcgccaccctggcaggagggggcgcagcagccggtctgggtgggcgctcactgtttgcccgcctgtctgccaggcttcttctctggctggcctctgcctgtgcccgggatcccacctcggccccggccaccaaacacacctagaggacagagagagggcgctgcagcagagccaggtgggtgggaccttcgacaggatcccggcgccctgaaactctaggccaggtcacctaagtctccagcctcagcttcctcatgtgtgaggtggtgactgagggtgcttggatctcctccgtggggcagagcatctgaggaaggcaggaactccagggcatcctcattatgggactagacccagcccccagggatgcgggggggggggactaggcgacagaggacactaagtcacattgggggttggggcaggcttcctaaaggacaaagccagaagggtttcctggaggaggaggaggaggtaggagaggcgtggagcagagaccagggcagtaggccaggctgggggctccctggcggggggggggcctcctatgcgccacaaccacccacagcccctcatctacctgccaggaggaaaacagaaagagggatttctgtgtatccagccccagggatggggaaggggaggggactccccagcaggcctgaggccagagatagaccatgaggacaaatgacattttccatgaagcccctgaggtgggagcatgtggccactggggaggtgacagggggttcccgggagatgagggccccagggactgagtggacgctacagcggcacctccagtaatcctgagcaggctgcacgcagggcacgcctgtccccacaccctctgtgtgcctggcgccccttcacgccaccctcaccacaggccaggcctggacgcagcaggttggtcaggccgggacccaacattgatccctccctctctgtctcccttggggaccccagctctgtaagccccgtttagggagccgtttcagagaactttctagctggacgaacgcttgaggaaatcaaagctggagcttcaaacagcaggagagccaaggccagcaagaggagctggccctgtggcccatgtgctgggtgccaggggccagaggccagcgctgcaggcagcatagctcaggccctccacagagcccgctgggaggctcagtcgtgggccagggaggtctggggacaggaggactgaccccaacaggaactggaatcacggtctactctgcagacctcaaccccgtgaaggtggggtcaggggtccagattcagaggatctaagaggtcagggctctcaccagccaggggccaccaggccctgtggggacagaggccagaggccaacgctggcctgggccaccaacctcccctctcaccaggcaggaccagctgtgctagggtgcacagcctggtgggggttactgcgaggctgctatctgcactccatggcccagtggcttcctgcagagcagccagagaaaaccccccacttccctaggtaggacccgacccactctctcaacaaccttgaccccaactactgggaaggagccaggccggggaccccagaggccccacccaccctgagatccccaaagctccctgcctggagtactatccctgcccctccctcgggctcactcctgaccacctcgtgagcctgcacagaattggcgcctggggccttccgggggcagccatgccgtgctgcaagcccccaggctggcacctgagcccagcacacaggcagtgcccatggatggcagaagcaaagcccaggtccccccgagaacacagagctggggacagagaggtgaggaagggcaggggctacagatggcccctgggcctaacaaatggaattttatgccaattcatcatctccggtgggggcgggcgaccttggctctggatagagccacgccaggttccaagtggagttgccagcggcctggacagatgggcaccaccataccctctcagaggggaaactgaggcttggggaggtgacttgatgtgccctgaggaccgccaggaggcgcagtgagaggagggctgagtcccaggtctcggggctcctctgcctgggcctcggctcatggccaaggaccaggaggggggcccgggagggttgggaggctccgaggcagcgctgcaagggcaaccccaagaaggagggatgccacgtgtggctgtcttcccgccccaggtacgtccactggagaggggagacccacctcggccagcgccgcccatgccgcggcctttctgctgcttctgctgctgcaggcctccgcggccgcggcccttggccaccacctcctccttgaccatgtcgatgatctcgtcggggatgcgcaggtacttgatggtgctgccgcggatgtagcactcgggcatccgccagaacttgtccccgtcctgcggagaaggggagcaggttattaacttaccaccgggccgtctggcccagccctgggagcgcgggaggccctgcagatcctgcccagcctgcaccccgtaccacccctgcaagctgcacagtatcagtcccgggacatacgtggcaaagggtccaccctgcaggcaggatctgtcctgaccccaggcaatccttcacccaggagcaagggtgggtgtggtaggcgcagcccccattgtgcactcacaaggaagactggctcctatcctctgcccgtgggcctggctcaggagtggctgactggggctccctccagcctgggatggggctctctctggttggggttcttcacctgcagcccaaagcccagagcgggtgggggcctccctgtgcaccagacacagccgaagcccagctactcctcctcctgccccagccccacctcacttctggaagcctctctacatgccctgactcattcattcatctaagtatctcctgacagggcctgcgctgggtgcagggacatgcgagcaagctacaggcctagtgtggtgggtgaagaggggcgggaaatggggggacttgggtcctgccagggtggctcaagggcggctcccagcgatgccagttttaggagagctaaccaagactggagaaatgggggccttgcaaagacacagactcatgctgcaatgcctccgaggcccccactgggacagatcgagggattagcaggggccagggccattcctaccatatcagtttcccagccccgccccaccgcccaggttcctggacagacccacgcacgacgcctggatggcctttgcccccgatgccctttaaagtcagatcacagtatgttccagcttggaacccacccagggccccctccagcctgggggcaaggtctaagaacctcagcagggctctctagggcccgagatcctgccccgccctggcggtcctctcccagcccgacgacactccctccagatggaactttctgtttccggaacacacgccatgggcttgcccccagaactttgcacgtggttttcccacttctcatctggctaactttgaccccaaaaggccttacctgcccgaatccccaagtcctcctgtcagacactctcctccacacctgggtaggtgtggcctggcctagcgctgggcggggaggaacagcccctttgggtgctcactctcccaggaacccctcgagggctcgtggggcggacacaccatggttctgtggggactcagggcctgggcaggtgacttggcgcccagctctcccaggcagggcccagaggcttcctcgtgcaggaacctgggcagggcctgagctcactgcagggaggcccctgcctcctgcccacagcgctccagaggtctctcagcccggggtctctgcatcctgcggcctgcctctgagggagggagggccccacttagatggggacgatgtgagttcccatcgcctctcctcccagccacatgtgacggcagcatcaccgcctggccacagaggcaggctgctcagggaaagccatccgtccactcgaagctggaggcagaggccaaaccaacccctggagaccacgcagcctctgaatcaacaggcttctcatgtctaggacctggaggtgtccacaagaccgcacatgctcacgcacgcaacacgcctggtgattccaataccggaagtggacagagccccgctggccgcagatgggaggcacgcggttctgcaccaaggcaccatccgacacagccagactggacccacccagacgccctccgacaggctatggcacgaaacccagcaagcagtttctagagcttctagcgctgctgcacagcagcctcaccacctgtccccaccccgcccagccctgtgctgatgagaggcccagtcccgggtgggggtggcggtcagggcaagatacggccacttcaggaagaagcgcctcccccctcgagccctgttgtcctgtcaaggtgaccccaggcaggcactccaagctccccagcagtttcctccctataccatggggggctgtcacccacagggagacaagacagatggggtcagggaaggttggtgggaggagtccaagggagccgctgccttcagcaccatccctggcctcctcctcagtgctctgtgggtcatcccaggggcagggaaggcccgtgacaccaggggaaccatcttccagccccggccgacccagcagcactcctagccaggcacttccggtcttgggctctggctggtggctcctgacccaccgggccctggcgctgctcctgcccaccgtgacctgggcatcccggacatcccagggccacactaccatggcccgcagagtgcaggcaacatccaggctggactaaaggcagcagagtccgggagtcttgggcctcccctggagggggctgccccagcctgagccacagggagtccccagtcctaggtccttccaggtcaggggtggcaccaacagacacacagcaggaaagtctcccacagggtcaaagtccagggcacactgggagacttggtggcctagctcaccctgccctgtccctcctgactgacccctggaaggacgagcagtcctaggcggcctcccccactgactcctcccatgaggcccagggagggagggaggaggctgagtgtgcaccccctgcatcccacccccgttggtgggtgcagcacccaccctggacgtgcagatgacttctcgcaggttaatgttcatccagttgtcgcagctcaccaggtgtccattgtacgtctccccatttttcagctccaccaactagaagagagacaggctagaggttggctgtagccctggagccctgcgccatgggcccctcaggaggtgtagctctgccctgagatggaccaccacctccgggcctcagcccacagttcccagacccctaaatggccttccttacaggcgacaggctctgcctccgctagacacttcgctggcagttagacagtctatcatgacgccaacctttgtgcaattaaaaaatgatactgggccgggcgcggtggctcacgcctgtaatcccagcactttgggaggccgaggcaggcagatcacgaggtcaaaagattgagaccatcctgaccaacatggtgaaaccccatctctactaaaatcataaaaattagctgggcatggtggtgcatgcctgtagtcccagctactcgggagcctgaggcaggagaactgtttgaacccaggaggcggaggttgcagtgagttgagatagggggaggttgcagtgagctgagatcgcaccactgcactccagcctgagcaacagagtgccacttggtcttaaaaaaacaaaaaactaagaaacacagaaatgtttaaaggaataagtgagacaatggtgatggtggccactgatccagggtggctgggggccaggtgggcacagctgggctggtcctggcaggcacccccacaacaccagatatttgggcttcagtgttccacaaatgctgttttttactgcaataattactcatctattttggtatgttttgagaacaaagataagtagcagatcattctgaggatatgctgctgttaggaaaagactgatattttttggtgtcttttatgagacagggtcttgctctgttgcccaggctggagtgcagtatcgtgatcatggctcactacagcctcaacctcctgggctcaagccatcctcccacctcagtttccctagtagctgagactataagcgcacactaccacatgtggttaatttcttttccttttgtagaagtggggtctcactgttgcccagactggtcccaaactcctgggctcaagtgatcctcctgtcttggcctcccggggtgctgggattataggcattagccaccacactcagtccaagcctgagattttcttttgagatggaagtttctctgttgttgctcagactggagtgcaatggtgtgatctcagctcactgcaacttctgcctcccgggttcaagtgattctcctgcctcaacctcccaagtagctgggattacaggcgcctgccatcacgcccagctaattttttagtagagacggggatttcaccatgttggccaggctggtcttgaactcctgacctcaggtgatccacccgccttggcctcccaccagggctgagatttttaaatgactcaacttaggcatctgcccaagagaaatgaacacaggcaaccatacaaaaatgtgtgcgtgaatgttcacagtgacactgttcgcaatagccaaaaaggggaaagagcccagatgcctatcagcagacaaacacataaacaaaatgtaggccgggcgtgagcctgtaatcccagcactttgggaggccgaggcgggcggatcacgaggtcatgagatcgagaccatcctggctaacacagtgaaaccccgtctctactaaaaaaaaaatacaaaaaaaattagccaggcgtggtggcgtgtacctgtagtcccagctcctcaggaggctgaggcaggaaaatggcgtgaaaccaggaggcggagcttgcagtgagcccagatcactccaggctgggcgacagagctagactccctctcaaaaaaaaaaaagtggtaagtatccgctccacggagtatcgtctggctataaggaatgaggcactgacacaggccacagggtggatgaacctcaaaaacacgttgctgagtgacaaccaccaggctcgaaaggcctcatggtctccgttcgcatgcatgggaaatatccggaataggcaaccccacagagacggcagctgcctcatgctcatcagggactggggctgggaagtgactgctgatggaaatgggctttccttttgtggagacggaaatgttccggcctagataaaggtggtggttacacaacctgtgactgcaccaaatgccactaaattgtgcactttaactgaagtgttagtatgtaatattatccttttttttttgagatggagtctcgctctgtcacccaggctggagtgcagtggcgcgatctcagctcactgcaagctccgcctcccgggttcacgccattctcctgcctctgccttccaagtagctgggactgcaggtgcccgccatcacgcccggctaatttttttgtatttttagtagagacggggtttcaccgtgttagccaggatggtctcgatctcctgatctgcccgcctcggcctcccaaagtgctgggattacaggcatagagccaccacgcccggccaatattatcattttttggagacagggtttcactgtcacccagcgacctgcaacctcaaacgcctcaggctcaggtgatcctcctgccttaggctcccaactaactggaactacaggtgcacgccactacacccagctaatttttatattttatggagagacgtggtttctccatgttgcctagactggtctctgaactcctgggctgaagccatcctctagcctcagcctcccaaagtgctggaattataggcctgagccaccatgcccaacctgaagttctttttatttttttaagtgacagggtcttgctatattgcccaggttggatttgaactcctgggctcaagtgatccttccacctcattaattttctttttctagagacaaggtttcactctgtcgctcagactggagcgcagtggtatgatcatagctcactgcagcctcaaactcctgggatcagtcgatcctcttgcctcagtctcctgagtagctgtgactataggcacacaccacctcatctggctaattttaagtttttcttcttgcccaggctgatctcgaactcctgagctcaagcgatcctcctgtcttggcctcccaaagtgctgggattacaggcgcgagccactgcaactggcccattaaatttttagtaagtatgtatgtattactcttacaagcagcagaaatgacaggagtgtggacactcctggggagggagaagagagcaaactgccatgctggtggacaggcaggccaggaagccgtctgctcagccaccgcccctgtgctgaggctggccccctctcaaacaggctttcccagaccactgagtactcaccatggggtgattctgagccgtcttcagcagtgacaagggaagctgaaaggcaaataaagccacatgatttgtctgtttgaccagcgcctgggagctctggtcttgagtcccacccatgactcatagatggtgcggtgcggttgagggggcacaggagtgcgtgtcaatcaccccccactggaaatgccatttcctcactctgcccagccctggaacacacacctgcctctcagattaggaagaaaagcctcacacaccctccctactcccgtaggtggccaccacctgctcttggtgctgaacactctggtcaattttttttttttttttttttttgagacggagtctcgctctgtcacccaggctggagtgcagtggcatgatcatggctcactgcaacctccacctcccgtgttcaagcctcacaagcagcttgcctcagcctcccaagcagctggggacaacaggcatgcgtcaccacacccagcaaatttttgtatttttaataaaggcggggtttcaccatgttggccaggctagtcgcaaactccagacctcaggtgatccacccgcctcggcttcccaaagtgctgggattacaggcatgagccaccgtgcctgccctaatgcttgtattttaagctcaaactggtatctctgagatgcatccatgttgatgaggttactctgagtatggagttgaggacactacagcttggaaacccgaggaacttgcccagtactatggcgctaggaggagacagagctggcctggtcctgtctgtctgaagcaagcacaagaccatgccttgcagggcagccccaactggcccaagactgacactgccaggccccaatgcaggggtcaatcccatcagagaaggccacatctgagctggttttatttttatttttttagatgaagccttgctctaaaaatacaaaactttgctgggcacggtggtgcgcatctgtagtcccagctacttgggtgctgaggcaggaggattgcttgagcctgggaagcaagcctgtcacccaggctggagtgcagtggtgtgatcttggctcactgcaacttccacctcccgggttcaagtgatcctcccgcctcagcctcccaaatagctgggattattaggggtgcaccaccatgcccagctaatttttgtacttttagtagagatggggtttctccatgttggccaggctggtcttgaactcctgacctcaaatgatctgcttgcctggtcctcccaaagggctggggtaacagcattgagccatcaccccccgcctgaactgggttttctttttttttttttttgagacggagtctcgctctgtcgcccaggctggagtgtagtggtgcaatctcggcttactacaagctccgcctcccgggttcatgccattctcctgcctcagcctcccgagtagctgggactacaggcgcccaccaccatgcccggctaatttttttttatttttatttttgtatttttagtagagacagggtttcaccgtgttagccaggatggtctcgatctcctgaccccgtgatccgcctgccttggcctctcaaagtgctgggattacaggcgtgagccaccgcacccggccctgaactgggttttcaaagacaggaagtcaccaggtaaggtgaactttcaagatttttttttttgatggtgacaggcttttactatattgcccaagctggttttgaactcttggcctcagggaatcctcccatctcaagctcccaagtagctggaattataggtatgcaccaccacgcctggtttcaagatgtttttttccatcattactgaatttctttattatgtcaaatatgtagtatttctattactgggggggaaatcaacactttcattttggaaacagaaaactcaacccgtacgctgggagctgcctcgggtaacgcagagctgtgcctgggtgcggggtcctataacatgcccgttctagtactgccatgaggaaggccccagcaccaaggggccctgacaagacagtgcctcatgggacacaggcttcacctagccctgtcctggtgactggaattccaggtggccctgaccccagatgcctttgctgggagtcctgccctggccaccaccctaatccacagtgtggctgcttttccaggtggtgtgaacttgaaggcctctccctgtggaggccggaaatggccctcaaccctggccgggtggctccccaatgaaaggaaggggttggggagggaatcctacatcccacagccccttcctgagaagagctgcccaggggaggttggtgccagcaggaagccaggcccaagcccacttcctgcaccggcttcctggaagagccagataagggggaagaaagggccatgtggccccggggcagctgctaggagaggcaggggaggagggctgcgggcggctgggtgtgcatctgactgggtgccaccagccacagagaaaacacaggagccacagactggcacacgggtctcatgcccaggtcgccctttactgtgaagaagccgtgggttttcctcagcaagcctgttttctttctctagtccgtaacaggaacgggaccttggacctcctcctggatcaccagggaaggcgcagaggtcaggctagcccttaaaggcccacctctcattctgcagaggaggcgccagcgcccacagcagaagtgacctgcccagggacatccagcaaggccctggcaaagctgcccagaggcaggtagcttgtagacacaccttccatgccagtgacagaccctcttgggccaccacctggtctcagcgaccaatagcacagcctgggaggacccacggcctccttgcctgtcacttgcagtcccatccaaaaagcagcagaaagaacatctgagaaacaaagagagctggtgggatggccacggaggctctcgcctgtaatctcggcactttgggaggctgaggcgggcagatcacctgaggtcaggagttccagaccagcctggccaacatggcaaaaccccacctctactaaaatacaaaaattagctgggcgtggtggtaggcaactgtaatcccagctactcaggaggctgaggcaggagaatcgcttgaaaccaggaggcagaggttgcagtgagccaagattgcgccactgcactccagcctgggcaacagagcgagactgtttcaaaaaaaaacaaaaaacaaaaaaacaaaacaaaagaaagactggctaggcgccgtggctcatgcctgtaatcccagcactttgggaggccaaggtgggcggatcacgaggtcaggagttcgagaccagcctggccaatatggtgaaaccccatctctactaaaaatacaaaaattagccaagcatggtggcgcacacctgtagtcccagctacttgggaggctgaggcagaagaatcgcttgaacccaggaggcagaggctgcagtgagctgagattgtgccactgcactccagcctgggtgacagtgacacttcatctcaaaaacaacaacaacaacaacaaaaaacccaaatagggttggtgcagacccactctcacaacactcctcaggcccgctatagagtcaaggcagacaggctctgccacactggccgccacacccattcctgccacctgacctttgcttctgctattgcctctgcctggggtgaccttccccaggctgctgaaacgtcacctcctttggccaggcccttttaatggccaccctctgcctcatgggtgtttgtttccatcataggatgcagccagtctttaattaccttgtttattacctgtgtccctcgctagactggaacactcaaagtgggtgtggactttgtccagggccaagcacaaggccaggcacatgagagggactcggtaaatatttgctgaataaatacacaagaaaaatgcacacactacccagggaggcatgcagggaaggcagaacactcgccccaccccacaggtaagggaaggagtggctgcgggacagggagctgcctgactcccaggccctcccaggctgcaatggcctgggcctgtgaccatatatcttgatttctcctacatcctcatctccaaactctgttggagagaggtcagaggaaggggtggatcctcaaaatcttaaaagaagatacatcaaagtgccaggtgaggctgggcacagtggcttgtgcctgcaatcacagcactttgggagactgaggtgggaggatcgcttgagcccaggagtatgagaccagcttgggcaacacaaaagattctgtctctacaaaaaatctagaaattagccaggtttagtgatgcatgcctgtggtcccagctacttgggaggctgaggtcaggtgggaggatcacgggccagtgaggttgaggctgtagtgattgtgccactgcactccagcctggatgagagtgagatctcagctctgaaaaacaaaaaaagtctagagtgcagtggctcacgcctgtaatcccagcactttgagaggccgaggtgggtggatcacctgagctcaggggttcaagactagcctggccaacatagtgaaacctgatctctactgaaaatacaaaaattatccaggtgtggtggtgcgtgcctgtaatcacagctacttgggaggctgaggtaggagaatcactctcggagaggtggaggttgcagtgagctgagattacaccactgcacttcagcctgggcgacagaacaagactctgtctcaaaaaaataaataaaatgaaatagaaaaagaaaaaaagtgccaagtgtgataggagaggccccaccctggtttatggaaggtcacaagaaaattcagaaaagagaattcctttctctgggctttcttggagcatctggaatctggttctcaggtctagatccacgaggacctaaacccagtgcctcctaattcaggaagctgtccaggactgcccatccccgctgctaacctaggccactccttctggccctgccctgacgacagggaactggaagtgtgtatcctgtgatggcttgtccattctcggctactcctccaggaaacagctggacagccaggactctggatgttcagaaggtgggaaggggctgaatgaatgagttcacactttgcccacgcaccgttctacatactgggaatctagtcggaagaaaaacgaagatcctgctcccacaaaacttaacacagggatggatccttccagctctgcccagtcttacatgccaactctgccctctaagtacaccgcagagagggacaggctctctgaatccttgcacttgaaatcgcctttgcaaaaattgtagcgggaaattatgacagtgaaaagagatcagacctaaccgactccattgtgcttctaacctttacgccatctttgcttattcctaggtataggccaaactaaccttgggaagggatttagtttatagtttgactctggaacaaaattggtaatagccctttcccgaaaagaccctcttcttgcctggggaccagtctgcctttgtaggactaacaaataagctacaagattagaaattaccatttaggtaacttcagcctctggctgcaagagtctgaaactccccaaattgctccttgggataacatcactattataaaatctaagatcagtgcttgagatattttgcagaccccgtacttgacggatcagctgacactacccagaccagtaatctggctcaaccagtcctgcgatcccacccaggaacagaagacagcaagaaaacctcacttcaacactcccgtcgatgactccatcgacctcaggaagctccaaccaatcagcactccccacttcctgagcccctacccgccaaattatctttcaaaactcggatcccctaatgctcagcggagactgatttgagcaataataaaactctggtctcctgcatagctggctctgtgtgaaatactctttctccactgcaattcccctgtcttgataaatctgtctaggaagacaggcaaggtgaacccattgggtggttacacactgaccagccggatttagggagagttctcactaatccacagttctgatgcagccacccctgggggaccctcctggttactgaatctcccactgtctcacagagtctggaagtcacatccccaacaagggccttggtttctctcattgaaaaaagaaggaccagaagctgatgggccaggaaactcccagctctgaattccttttccgatctgcacagtgggggacacgggcactttctagcccagatccagaacttccagaatcataaacaatgggccctgcagagacctgggccgcaatttttccttctttgtattgggaggatgtactttgtccacccctagctcaaaacgcccccttccgctggaatgacatgctatgtgacccaaggagaaacaccacaccccagcaccaggcctgcttttcagccagaaaccaagaggcctaggaggctgtgctgctagcatcttgcaagctctgaaattcctaaaactaagtttcacaactcagactggccccctacttcccagcactctagttttcaatcagggaggtcagactgggcccgaagcgtaagggaccccttccctgcccaaaaactctctgctgcatttggcggatccccaccttttttttttttacttcagtttccccacctgcaaactgggaaaactaactaaggcgaggccactgtactgtggatacaagtccgtgcaaccctaaatcccagacacgaacgtgatagagccacctgcagtctccggcctcagtttcccagcctcgtgccggggggcgggactcgaggctcggaccttacgttcgccccgcgccaaccaagcccacagcgcccgcccgcagggatcccaacgactgctgttcccgcctcccggtgagaccccgcagttgccctgccctcaccatggtgccggcggggaccgggctcgccggccacttccgccgccgccgctgcacacgctcccggcggtcgtcgccgcgccgcgcgccactaagctgaaagaaagtggcagagacgcaagccagtcagcaccgggctcgaagggcggtcaaccaatccacgcggagtagggcggggcccgctgggcgaaagggcggggcgggccgtgttcccgccggaggaacgaggacgagagccgtaaagtgccgcggcttgtaatgcaaaaggaggcggagcaacgcgcgccggcgcggggtgcattgtgaggaaatgcgtgcgcaggtgaaaccttcgtcggtctcctgggctccacgctgtgggcaaagccagttaatgcctttcgtttgcagtagagagagagaaatcgaggcttcgtggtgattgggccgtgcctgatgttgcccttccgactcctagttttctgattctgtaattatccagggaacatcatttaataggttggaatcctgaccacgaccctcggggcctcagtttgctccctgtaaatagtagtgtctgctccaaaacgttgcttactgtaaggatgaaatgaatgaaaccatgtaaaagcacttaaaacagcgtctggcacatattaagtacttattacctactctgtgcctgtttctgctcacagaatgaacaaaacacaaaattcgtggccctcagggagacagacagtaaacaaagtaaataggcgaatgctattagttttctggggcctgctgtaacaaatgcccacacactgcgaggtttaaaacaacagaacgtgattttctcacaattcaagagatcagaataatgaagtgaggttgtcagcacagttggctccctctggaggctctgaggacaatctgtgtgtcctatgcctctctcctgggttctggtggctgctgggaatccttggagttcttggcttgtagatgcagccttccgcgttctgcctttgtcgtcacttggccttctctgtgtgtctctgagtctcaaatgtatctctccttttttttttcttttttttttttgtagtagagacagggtctccctatgttgtccaggctggtctcgaactcctggggtcaagcaatcctccctcctctgcctcccaaagtgctgggattacaggcgtgagccaccgagcccggccgctcctttttcttgtaaaggacactcctttctcttattaagtccaccataaatttcaggataatgtcatctcaagatccttaattacatctgcgaagaccctgttcttttttttttgagatggagtctcattctatcacccaggctgcagtgcagtggtgcgatctcagctcactgcaacccctccctcctgggttcaagggattcttctgcctcagccacccgagtggctaggattacaggcacatgccacaatgcccagctaatttttgtatttttagcagagacggggttttgccatgttggccaggaggtggcctcgaactcctgacctcaggtgatccttccaccttggcctcccaaagtgctgggattacaggcatgagtcaccacgcccagcctcgtttttaaatgactgatgctatttattgacattattcataatatcaaaagactgaaaaaaacccaatgcgaccaaataatagagtaatacagctataaaaaggaatgaagacaatcttcatatactgacattgaatggtgtctggatatcttaagtgaaaaaaaccaaggtagagaacagtttttacaatatgtcctcttttgtgtgcaaaaagagaaatacatgcatgtgtatgtgtatatatatttgcatgtgtgtgtgtatatatatatatatatatattttttttttttaaccacaccaagcacgtgaaccaaatttgcttatatttttaataagaaacataaaggccaggctcagtggctcatgcctgtaattgcagcactttgggaggccgcggtgggcagatcacctgaggtcaggagtttgagaccagcctggccaatatggtgaaaccccatctctactaaaaatacaaaaaaattatctgggcatggtggcgggcacctgtaatcccagctactctgggggctgaggcaggagaattgcttgaccccgggaggtagaggttgcagtgagccgagaacgtgccactgcactgcagcctgggcgacagagtgagactctgtctcaaaaaaaaaaaaaaaaagaaacgtaaaaagtacgaaccaggccaggagcggtggcccatgcctgtaatcccagcactctgagaggctgaggtggctggaccacttgagcccaggagttccagaccagcctgggaaatacagcagcaaaaccctgaatctacaaaaaatgcaaacaagtagccaagtgtggtgactgtgcatgaagtctcagctactcaggaggctgagcagggagaactgcttgagcctaggaggcagaggttgcagtaagctgtgatcctgcctctgcactccagcctgggtgacagagcaacacactgtctcaaaacaaacaaacaaaagaagcatgaaccaaaatataggccaggcacggtgtctcacactttaatcccagcattttgggaggctgaggcaggtggatcacctgaggtcatgagttcgagaccagcctggccaacatggtaaaaccccatctctataaaaatacaaaaattatctgggcgtggtggcgcgtgcctgtagtcccagctactcagaaggctgaggcaggagaatcacttgaacccggttaggaggaggttacagtgcatgccattgcactccagcctgggtgacagagcaagactccatctcaaaaaaaaaaaaaaaaaaaaaaaagtaacctgggagaataagggaacaagatgaaatcataagaatgaaagccagacttctttcagtgtaccttattgtctagtttcaactttggaagcataattaaaaataaaagtcaaaaggaaaaatcaaaagaaatccctaaaaatggaaacaaacaaatgaacctcactgtatatcaagttgcaaagaccctatttcaattacagtcacattcacagctaccagcaggttaggatttggatatacgtgtgtgtgtgtgtgtgtaaatttttttacgactgcgtccctcttgcccaggttggagtatagtggtgccatatggcttattgcatccgcaacttcctggggtcaagtgatcctcccatctcagcctctgagtagctgagactgcacacaggtgtcaccgccacgcccagcttatttattaatttaatttatttatttattcattttgtagagatgggggtctgcttgttgccctgccctcaccgtgctagcctccaactcctgggctcaagagatcctcccaccttggcctcccaaagtgccaggattataggcatgagccaccatgcccagctgggatatatatttttaggggctactactcattacatcaagtatcagctgtggtagctttaaacataggcatttatttgagtagtttacttctccacagtgacatgcctatagtttttttttttttttttttttgaaacagagtctcattctgtcactcaggctggagtacagtggcgcgatctcggctcactgcaacctccacctcctgggttcaagcgattctcctgcctcagcctcccaagtagctgggattacaggtgtgcaccaccacacacagctaatttttgtatttttagtagagacggggtttcaccatgttggccaggctggtctcaaactcctgacctcgggtgatccacctgcctcggcctcccaaagcgctgggattgcaggagtgaaccactgtgcccggccaatgacatgcctatagttacatacacttgcaagcaggactataacctgaattcctagaagaggcttatctaggtgccaatcaaaggttccatcccctggccacatgccttgactttcaggcctacaaatgagcaataggggacctcataaagtgactccttgtatcccagcctcctgagtctcagcactgccctgagagccttttcttaccaagtccagggtgaggaacttctggctgaaaggaccctatgcctctcagagctgaactggggaacccttgttcaacttctcaaagattttcctgctgggcatggcggagcacgcctgtagtcccagctactcaggaggccgaggcaggatgatcgtttgagcccagcagttcgaaatcccaattccctgatccttctgactggcaccacatccaggtggagtggactctggaggtctgagaaagcccagggagccttataagaggaagccaggccaggcgcagtggctcacacgtataatcccagcactttgggacgccgaggtgggaggagatcacttgagccagaagttccagaccagactgggcaacataataagacctacgtctctactaaaaattttaaaataggccaggcatggtggctcatgcctgtaatcccagcactttgggaggccgaaagttcaggaaagttcaggttcaggaccagcctggccaacatggtggaaaccctgtctctactgaaaaaaaaaaaaaatacaaaaattagctgggtgtggtggtgcgcctgtaatcccagctactcaggaggctgaggtgggagaattgcttgaactagggaggtggaggctgcagtgagaccagattgcaccaccgcactccagcctaggcaacagagcaagaccccatctcaaaaaaaaaaaaaaaaagaaaaagaaaaagaaaagaaaatatggcgaaaccccatctctactgaaaatacaaaaattaggctggcgcggtggcttacgcctgtaatcccagcactttgggaggccgaggcaggtggatcacctgaggtcaggagttcaagaccagcctggccaaaatggtgaaaccctgtctgtactaaaaatacaaaaattagccaggcgtgttggcgggcgcctgtaatcccagctactcaggaggctgaggcaggagaatcgcttgaacccgggaggcggaggttgcaatgagctgagatcgcaccattgtactccagcctgggtgacagagcgagactctgtctcaaaaaaaaaaaaaaaaagattagctgggtgcagtggcctgcggctgtagtcccagctacttgggaggctgaggcaagagaatcacttaaggccggaaggcgcagtttgtagtgaaccgagatggtgccactgcactccagcctgggtgacaaagtgagactccatcataaaaaaaaaaaggaaagaaacagggtctatgaggtgtcccagcatcaacatggcgatgaaggtagcagcaaaccgcatgctgggtcatcctttctgacttttctagacttttctacatgcagtctttctttttttgcacaacttgcaaactcctattcatcgttgaaacctctgcttcggtgtccccttgtggcagccagtggttactgcagtttttttgtttgccctttcaacagtaagggtggccaatcagcgttccccatccccctggctacagggattggttaaagaaagagcacggaatttaccaaggccaatgagattctcccctgggaaggataccgagggctgggagggagaagagctggttcctggggagttaaagggaaagtccagcaccccttaggctctgtcctctggaagaagctttctgcagaaataatccagcagacacaagacaacggaggtactcggtggaaagggaagtatggtttgagcccctggatccagctatagttgaagccacagctatgatgagcttaaatgagcccaagaagttttttttaattgcttcatccacttggaatttgcagtctgtccctggcaaaagagccagtactaatgcatatctgctctgtgaactcttccttagctgccttgctcaaaagctaatcattccttctcttatactttgaactttagtaccctccactgatttccatcattgcctggtttatgccatgttgtaattgcttgtttcagccctctcaactttgacttgtaggagcaaggacctaagaggtttcctggggctctatttggggctgttcaggacagtttaccctcccctatcatcatgaatgcatgacccaggctggggcaatcagaaggcttccctggctggctgagcatggtggctgatgcctgtaatcccagcactttgggaggccggccggtggatcacctgagcccaggagttcgagaccagcctggggaacatagcgagacctcatctctccaaaaaaaacttaagaagaattagctgggcgtggtggcacgtgcctgtaattccaactacttgggaggctgagatgggaagatggcttgagcttgggatttcgaggctgcagtgagccatgatcatgctactgcactctaccctgggtgacagagcgagatcctatgaaaaaaaaaaaaaaaatcttccttgggatggttttgggattgcagagctggagtgatcggcgatcacagtcaggtatagccatggccatttcttcactgcagagtcatggccgtgtctaagcctgagcccagctgtatctgatgcttcataaatcttcattcttccgtattccactaaccaaaatcctattctggatccagcttaaattatatttctgaccgggcacagtggctcacacctgtaatcccagcaatttgggatgccaaggcgggtggatcacctgaggtcaggagttcgagaccagcctggccaacatggcaaaaccctgtctctactaaaaatacaaaaattagccaggcgtggtggtgggtgcccgtaatcccagctactcaggaggctgagtcaggagaatcacttgaacccaggaggcagaggttgcagtcagccgagatcatgccattgcactccagcctgggcaacaagagcaaaactctgtctcaaaaaaaaaaaaattgtatttcttccagcagaaacctaagaagtctagatcaatgtacgtctccaactaacaaaaataccctacccactactaaaaaaaaaagaacagcataaaagccagtactggcaaggttgtgatgaaactggcaaacatgtgtttccttttaaatgggaaaaaagttggtattatatctcaaaagctataaaagtatcacacccttcagctcagcaatccatttctgaacatttctactaaggaagtctttcgggtgaagggaaccaccatgccagggcctcacagcaatatcgccaattctaaaagagcaatattttgctgggcgcagtgcctcacacctgtaatcccaacactttgggaggccaaggcgggtggatcacttaaggtcaggaattcaaaaccagcctagcccaacatggcaagaccccgtctctactaaaggtacaaaaactagccagccatggtggcgtgtgcctgtaatcccagctacttggggggctgaggcatgaaaatcgcttgaacctgggaggtagaggttgcagtgagctgagatcacgccattgcactccagccggggcaacagagtgagactccatcttaaaagtaaataagtaaatagcaggtttttttaaaaaaaattagctgggccaggcgaggtggctcacgcctgtaatcccagcactttgggaggccaaggcgggcggatcacgagatcaagagatcaagaccatcctggtccacatggtgaaaccccatctctactaaaaatacaaaaattagctgggcatggtggtgatcacctgcaatcccagctgtttgggaggctgaggcagaagaatcgctggagtccaggaggtggaggttgtaaagagctgagatcgcgccagtgcactccagcctgggcaacaagagtgaaactccgtctccaaaaaaaaaaaaaaaggaaacgcagacaccctcctgggttgcgcttcgctggtcaaggcagtgaccctctcccatccggggaaccaggagcctcacatggatcaggcccttcctgatccatggccacctgagctgaaacaaaatatcatttgtaccttgcccagtgcattcctggggtgcaggcaaccaaagaacagaggttcatttgcccctgtccttggccgccttcatatcccagagtcagaagaagcagagattcctcaaatgggttttgttttgttttgttttgtttttgtttttgtttttactattttgagacggagtttcgctcttgttgcccaggctggagtgcagtggcgtgatctcagctcactgcaacttctgcctcctgggttcaagcaattctcctgcctcaacctcctgagtagctgagattacaggcatgtgtcaccacgcccgggtaattttgtatttttagtagagaccgggtttcttcatgttggtcaggctggtcttgaactcccgacctcaggtgatccacctgcctcagcctcccaaagtgctgggattacaggcgtgagccactgcacccagccatggggtctttctttcttttttttttttttttaagacagagtctcagaaagaccccctcaagtggggtcttgaaacttcctccactgtccacctacgcccagtggcctggtagaagttccttagatgggcacggagactgctggatccagccccccttcatcctgcacacatctctgcccccgcgcattaattgtgcacctactgtgtgctggcacagactaaagggaaagaagacccagcctcaacgttcaaactactccaggcgaaaagagggagaggcaggagtggggagtggagcagtaaatataccctccaaggggcgggccagggctggatgtgggagcaggggccatgggcagtggctgaccaccaaaagcacatctgtgggcctagtctttttgttgttgttgtttgagacagggtctcactctgttgcccaggctggagtgcagtggcaagatggtagctcaggccaggtgcggtggctcacacctgtaatcccagcactttgggaggctgaggtgggcagatcacttgaggccaagagttcgagactagcctagccaacatggtgaaaccccatctctgctaaaaatacaaaaattagctaagtgtgatggcgcgtgcatgtaatccctgctacttgggaggctgaggcaggagagtcacttgaacctgggaggtggaggttgtagagagccaagatcacacgactgcactccagcctgggcaacagagtgagactccatctcaaaaaaaaaaaataaataaaaggataatagctcactgcagcattgaactcctggactcaagtgatcctcctgtttcagcctcctgagaacctgggacctgatgagctcgctaccaccttcgggtgattttaaaattttttgtagagatagggttgcacagcctggtcttgaattcctggactcaactcatcctcctgcctccacctcccaagtatgagccttgtcttctagcctgagctccccaaaggcttcactatctccagacaccgcctggagaaaaaggacacattcatcctttaagaatgcatgtctgggccagccacggtggctcatgcctgtaatcccagcactttgggaggccaaggcaggtggatcacctgaggtcaagagtttgaaaccagcctggccaacatggcaaaaccctgtctctactgaaaatacaaaaaagtaaccaggcgtagtggcagacaactgtaatctcaactactcgggaggctgaggcaggacaattgcttcaacctgggaggcagaggttgcaatgagccgagatcgtgccattgcactccagcctgggtgacaagaacgagactgtgtttaaaaaacaacaacaacaacaacaacaaagaatgcatgtctgcccagacatctctctccctaccatggccatgaggccccctgcagtcctcaaactgggcttggtttactctgacagagccaaaaggacagagccctaacgcagagccgtgtcgtccccatgagctccaaatctccctcccttccaaggccactcctattagcaactggcaaagcccagagaggcttggagcccccaggggcaggatctgagcgccggtgcagagtccatgagtcctgccttcccccacctggctccctagggcttgggttcagggtggccttagtcctcagaagctccccaaacttccctgggttgtggaggtgggaggctagagaaaaatgtagcttctgcccagcgcagcgatacacatccgtgatcccaactactcgggaggctgaggcaggaggatcacacgagcccaggagttgtgggctgtagcgcactgtgctgattgggtgtccacattaagtctggcatcaatatggtgacctcccggagcagggaaccaccaggttgcccaaggaggggtgaaccagcctaggttggaaacggagatggtcaaaactccagtgctgatccgtagcgggatcatgcctgtgactagccactgcactccagcctggtcgacagagtgagaccctgtctctaaaaaagataaattttaggctgggcgagtggcttatgcctgtaatcccagcactttgggaggctgaggcaggcggatcacttgaggtcaggaattccagaccagtacggtgaaactctgtctctacaaaaataccaaaaaaaaaaaaattagccaggcggtgaaactctgtctctacaaaaatacaaaaaaaaaaaaaaaaattagccgggcatgatgacctgcgcctgtggccccacctactccggaggctgaggcacaagaattgcttatacctgggaggtggggtgagccaagattgcaccactgcactccggcctgggtgactgagcaagattctctctagaaaaaaaaagagatacatttaaaaaatgcagcttgttttgcaaaccaacatccagcttggcaggttttgctctatttagcatttttttgtttgtttggtttttttttagataggtattgctctgttgctctggctggtctcacactcctggcctcaagcaatcctcccacctcaccttcccaaagcgctgggattacagcaggggtccccaacccctgggctaaggactggtaccagtctgtggcctgttaggaaccaggccgcacagcagtaggtgagcagcgggcaaaccagtgaagcttcatctgtatttacagccagtacccatcactccccagtatctcctgagctccgccttctgccagaccagcagcagcagcattagattctcataggagtgtgaaccctattgtgaactgcacatgtgagggatctagattgtgcactccttatgataatctaatgcctgatgatctgaggtggaacagtttcatcctgaaaacatcttcatcccccccaacccccaagtgcatggaaaaattgtcttccataaaaccagtccttggtgccaaaaagattggggactgctggattacaggcatgagcctctgcgtcaggcttcacagcattgttttttgtttgtttgtttttttgagacagactctcgctccgttgcccacgctggagttcagtggtgcgatctcggctcactgcaacctccacctcccagattcaagcgattctcctgcctcagcctcctgagtagctaggattacaggcatgcaccaccatgtctggctgatttttgtatttttagtagagatagggtttcaccatgtttgccgggctggtcttgaactcctgacttcaaatgatccacccgccttggcctcccaaagtggtgagattacaggtgtgagccaccgtgcccggccatttattttattatttatttatttttattattttattttattttattgagatggagtctcgctctgtctcccaggctggagtgcagtggcgtgatctcggctcactgcaagctccgcctcccgggttcacgccattctcctgcctcagtctcctgagtagctgggactacaggtgcccgccaccatgccctgctaattttttgtatttttagtagagacagggtttcaccgtgttagccaggatggtgttgatctcctgatctcgtgatccgcccgcctcggcctcccaaagtgctgggattacaggcgtgagccaccgcgtgtggcctatttatttattcattgagacagagtctcgctccgtcgctcaggctggagcggagtggtgcgatcttggctcactgcaatctttgccgcctgaattcaagcgattctcctgcctcagcctccaaagtagctggaatcacaggcatgtgccactgatacgggagtgctgggatggggggagcgtggtgcctttaaatgatagggaagggaagtgcggggtaaaggagggcctggtccctggctagggctccacccccagagacctaggtgaggatccgcactcccgccttcgtgcccaaatattgcattttccaggaccacactggcccgccacgcccccatcctgtgcctataaaaacccgagaccctagcgggcagacacacaagctgctggacgtcttgacgtacacatccatggaagaagatacaagtggctggacagcgagaggacgtcgagggagcacgctcgcggaagggcacactggcatgcaggcgggtagtcgaccagtggaactaggctgagtttggcctgggcagtcagaggagagctggggccgcctagcgacccaactccagagaaagaccatctcccttctcgctcccccatctactgagggctacttccactcaataaaacttcatactcattctccaagcccaggtgtgatctcattcttctggtacaccaaggcaagaaaccccaggatactaaaatccctctgtctgggctgggcgcagtggctcatgcctgtaatcccaggactttgggaggcctaggtgggtgtatcactcaaggtcaggagtttgagaccagcctggccaacatggtgaaaccccatatctactaaaaataaaaaaaattagccaggtaagggtgcggtcacctgtagtcctagctacctgggaggctgaggcaggagaatcactttgaacccgggaggcggagatggcagtgaaccaagatcaagccactgcactccagcctaggggacagagcgagagtctgtctcaaaaaaaaaaaaaaagaaaagaaaagaaaaaaagaaaagaaatccctctgtccttgtgacaaggtagaggatctaactgagctggtaagctgcctatagatggcaaactaaaaaaagcaacctgtaacacacgccccctggggcttcaggagctgtaaacattcaccccggacactgctgtggggtcagagtcccacagcctgcccatctatatgctcccctagaggtctgagtagaggagcacttcagaagcaagccacacccccatcgcccaccctgcgaggggaacaagggaacctttcccgtttcaccaccatgcctggctaatatttttgtatttttaagagacagggttttcccatgttggccaggctggtcttgaactcctggcctcaagcaatccacctgcctcagcctcccaaagtgctgggattataggcatgggccaccacacccagccacagtcatccaattcatagagacagaaagtggaatgttgggtgctaggggctgagggaggggaatagggagggagcgtttaataggtatggagcttgtttgggaagaacaagttctggagatggatggtggtaatggttccacaacaatgtgaacgtacttaatgctacccaagggtatgcttaagatggtaaattttatgttatgtacatgttactacaaaccactgccccccaaccccggccgaggcgggcagatcacttgaggtcaggagtttgagaccagcctagccaacatggagaaaccccatctctactaagaatacaaaaattagccaagcatggtggcgtgcacctgtagtcccagctatttgggaggctgaggcagaagaatgacttgaacctgggagacagaggctgcagtgagccaagatcgtgccactgcactccggcctgggtgacagtctcaaaaaaaaaagttcctccaagttgggcatggtggcacatgcctgtagtcccagttacttgggaggctggggtgggaggatggcttgaccccagggggtggaagctgcagtgagctgtgactgtgccactgtgctccagtctgtgagacaaagcaagatcatatctcaaaaaacaaaaatatggcccaaacatgattagggctacgagtgaacattagcctttacgccagtcactggggcagtggggcatgactcagtttctccccatcactgctgactctacatgttttcgttcctcccattgcaattgaggaaactaaaatccactgtcacttccctctcgccttccctcttctagcaacgcacatactccacaccaggcacgtatgacatattcaggttataaaacctgcctttgggtgagtggtttttttgttttgttttgtttttttctgagacggagtctcgctctgtcgcttaggctggagtgcagtggcacgatctcagctcactgcaacttccgcctcctgggttcaagtgattctcctggctcagcctccccagtagctgggactacaggcacgcgccaccactcactgctagttttttgcatttttagtagagacagggtttcaccatgttggccaggctggtctcgaattcctgacctcaagtgatccgcctgcctcggcctcccaaagtgctgggattacaggcgtgagccactgcgcctggccaggttagtgttttgatctgctcttttctccctcttggcttggacctcattccctggccagctcagacagctctctgatgttctgcattctacctgaagctgctaaagaccaaaatagccactgagcgtgtgacctggggtgtgggcttccaaacagggctcaggggcagtctagagaactctgcccttggtgttggaggaattcgggggtggagccagtaaacaccatagtaccagctgggcacggtggctcatgtctgtaatctcagcactttgggaggccaaggcaggcagatcacctgatgtcaggagttcaagaccagcctggccaacatggtgaaaccccatccctactaaaaatgcaaaaattagccgggcacggtggcaggtgctggtagtcccagctattcaggaggctgaggcaggagaatcgcttgaacccaggggccggaggttgtagtgagcctagatcgtgctattgcaccccagcctgggcgacagagtgagactctgtctcaaacaaacaaacaaaaaaccatagtgtcttggcgaatgatggcaaagtcaaagtggaacgggctatcagtgaaccacacagtcaggagttctggctcatgcctgttatcccagcactttaggaggctgaggcaggaggattgcttgagcccaggatttcaagaccaacccaaacaggcaacatagcaagacctcgtccctacaaaaaatataaaaattagccgggcatggcagcacgcgcctgtagtcccagctactcgggaggctgaggtggaagaattgctttagccttggagattaaggctgcagtgagctgtgatcgctccattgctctccagcctgggcaaaagaacaagatcctgtctaaaaaaaaaaaaaaaaaaaaaattcgtgacccaagtccaaggtccagtcctgtttctgaagatgtggccagaaactcagctttcattttctacctgtttttagaggaattctggtctctgatgaatgttggcagaatgtgcctggggatgtgctgggtgttgagacgcagctctaacagaacaacgcttcctcctctagaagttctcatctctatgtcggaggaaacgggaagccaaccagagaggctgtgaccatactaaatgatttctgcttaataatacctggggagggggccggaggcagtggttcacgcctgtaatcccagcactttgggagctgaaaagggtggatcacctgaagtcaggagttcgagaccagcctggccaacatggtgaacctccctctctactaaaaatacaaaattagctgggtatggcggcactcgcctgtaatcccagctacttgggaggctgaggtgggagaattgcttgaacccgggaggcagaggttgcagtgagccaagatcacaccactgcactccagcctgggtgacaagagtgaaactacgtctcaaataaataaatacatatataatttctgcttaataatacctgggggactaaataatctgtacaacaaaccccatgacacgagtttatctatataacaaacctgcacatgtaccccaaaacttaaaagctaaaaaaaattaaaaatgatttctggccaggtgtgctggtttacacctgtaatcccagcacttttgggaggccaaggtgtgcggattgcttgagctcgggagttcgagaccagcctgtgcaacactatgaaacccccatctctacaaaaatacaaaaattagctgggtgtggtgccacacacctgtagtcccagctactcaggaggctgagatgtgaggatcagttgagccctggaggtcaaagttacagagctatgattttgccactgcactccagcctgggtaacagagtgagaccctgtctccaaaaaaaagagagagaaaggaaattatttctgagctttattgctatgaagaggatggaaccagggaatgagatggaaccactggggggtagcagtgaggtcatttcagccaaggagggccagaaggaaccctcagaggaggtaataggatagcagggaggtgatagccagagaaggccacaaggagaaagtgacagttcacccctcggaggaggtgacagccaggacaggaggagggcccctgggaggaggcgacattggaacactggagctgaggcctgaaggaggccagcttcgcaggtacctgcggggtgtgttccggcagagggaacagcaggtacaatcgccctcccccattagcctcctaggaccatgggggcctgcagagaaacttctggcaccacacaaatatggttgtcgtgtttttccttttttactctgtcctcccccacccccgccaacttcctggcctgaatgctgctcctgtgaccccttgaggcgagtgacctcggggaagtggcattctgtgcctcagtttccttatctggaaaacgggccttgctcgcggggacttccctccctaattctgcgcagtatgcatgcatagggcaggccctcaatgaacccttgcagaataaaggaccggctcatccccagcacctggctcagtgcgtgcaagcggctacacactacggcataagatgttcccattttgcagacggggaaacggaggctggggaataccgggcctagccgacgggggcggggcgcagggcgcgcacgctgcgtctcgggcccgggggcgcgcacgccgagcggctgaccgggggcgaggccgggggcttgacaggggcgtggcctcgcgcggccgagaggctgcagcggcagcagctgtcgcgccagtcgcaacagaagcaggtccgaggcacagcccgatcccgccatggagcagccgaggaaggcggtggtagtgacgggtacgctggctgatgggggctgtagcggcagcggccgggggcagaggcgggggcggctccgggactgcggggccgagaggggcaggtgctggaagtcctctcagatttggaaggtgtcatcacccgcgggagccccgcgcagcccaggcttcctggaaagtggaggaggaggagccttgggggtcccagggtcgggagtcagggcagtcgggcgcggggcttggggggccgggcaaaagcccggcgctgcgcaggcccccctggcgtcctttcctcccaaggtggggatggtgaccctcctggcacctgcctcctctgtctggcctgcgggctggactggacccttcctccctgccccttccgaggtccagcctgtccccacaccgctcccccaacccctggccccaggggacaaaggccgatttgcgggcaggaagtgtcccagtgacaaatgaacctcccagtcactgctcgccgcgccctgcgctcctggggggctactctcccaaggcaggggcaggtgggggtccggggacctcgggctctcccagctgtcccagggactgtcttcagcggaaacctttttgtgttttgtgccagggctgtttgttggtgagtcagggcccctgctgtcaccgactcccccccacccccaaaccaactgtttctcctccctgagactccgcctcggggccacgtggggcgccaacttccgctggggcctcagagtcaaggagtgggggggtcattttgacctgctgtctggaggggtcagagtgggaaatccagcaaaggtgcacacaggtgttttgtggctgttgaagggagattgaggctgatccaggagattcagggaagaaggaagaaacaaggcacctgcttaacaggtgtgtataattgggaggagggtcactgcccccatcccttccagccttcctttatctggttatttattccagcactttttgcatgagctgattacatctttactgtctccattttgcagaaagggaaactgaggctcacagaggtcatccagtttgtaaggggctgagctgagactcaaactttggctgtacagaaggatagagttaggaggtcccctcctgagccacagcccctacctgctatcccaggctacagcatctctgcatagcattcatatcctgtgggatcactggcccagatggaccgtatttttttttttttgagacggagttttgctcttgttgcccaagctggagcacaacggcgcgatctcggctcactgcaaccttcgcctcctgggttcaagcgattctcctgcctcagcctcctgagtagctggaattacgggcacgcatcaccccatctggttaattttttgtatttttagtagaaacggggtttcaccatgttggccaggctggtctcaaacttctgacctcaggtgatccgcccgccttggcctcccaaagtgctggaattacaggcatgagccaccgcacccagccccagatctggatttgaatcccagctttttcaccttcttgctgtgtgaccttgggcagctagcttcacctctctgtgcctcagtccctgctcctggaaactgggcctaggaaacacccttgcctgaaaggggatgtggccaggcttaatgccaggaagatcacttagcacagccttgggcgactgtcgtgttttggaaagggggcctggagtttgagctagcagggaggagggtgacaaggtgaaatctagacagcctggagggctcattcctcatttggtgccgattcagggcattttgggacagtgacacaataattgtaggttgagtcaaggggaccagaggaagtgaagacaggatcaggaccttttcggaggcagaagatacctctggcccctggctgagcatgaggggcaggtggaggtgaagacaggaagggactcattgacttcagagcggacaggtgcaggacggcggctctgacgggcctccaggtgctcccagaactcaggaccaggcccccaatgttgtccttggcagctgcgccctgaagctcctttcttgcttctccaggtgggagtagcggccaggccaggggcagactgggaagggccactcttgggtaatatattgcttttcctgttttttcaggatttggcccttttggggaacacaccgtgaacgccagttggattgcagttcaggtaacttagatccggagggtgggagtcaggcttggagctgggcacaccccagaaagttatggcatccaagaaggtccccttttaacaaaaacttttttttttttttgagacgaaatcttactctgtcacccaggctggaatgcaatggcacaatctcagcccactgcaaccttcgcctcctgggtttaagcgattctcccacctcagcctccagagtggcagagattataggtggctgccaccacgcccggctaatttttgtatttttagtagagtcggggtttcaccatgttggccaggctggtctcgaactcctgacctcaagtaatcctcctgcctcagcctcttaaaatgctggaattacaggcgtgagccactacgcccagccagctcttaaaaaacgatgtcggatccacatctcttcctggatggtaaccaccggagcacacatctgttgagtgtttgtaccccagcgctctgaatcctcccaacaacccatgcatagtacgtgtagttattcttgtgcccacttaacagaataggaaactgaggcccagaggagggatgaagggagttctccgaggtcacacagccaagaaatgggagtggcattgcctcagaagtgccccaggccctggccagcggctacagatctgggtctggagggccaggtgtggatataaacgtagctggtttccaggacacagctgtttatgtggtgctggcgtctactttacctaggaattatccaactctaggatctccctcttttttttttttttttttttttgagacgaaatctcactctgttgcccaggctggagtgcagtggcgcgatcttggctcactgcaaccttgccttctgggttcaagcgattctcctgcctcagcctccagagtagctgggattacaggcacctgctaccacgcctggctacttttttctatttttagtagagatggggtttcaccatgatggccagactggtctcaaactcctgacttcaggtgatccacccacctcggcctcccaaagtgctgggattacaggtgtgagccactacccccggccaggatctccctcctttttaaaaatcttttccattgactcagacaaatcgtgactcaggttggtttctgaacagccaaagtgagaattctctggtatgttttaggcaggtaattcatggttcaggaaggaccaggcaggaatatgtggggtggggtggcaggggaacatatcttgaccttgtaggaaggggtacagtgagcctcgctgtcatctcctcgcagctgggggaggaaaagatggcatattaggggccgaggggggctgtcattcctggtgccctgaagaagatgccagtctgcaaaacctttctagtttcttttccagatggagtattttgtagggacaggctggggagcaatgcacagagagaaagacggaagtgttttctcgttatataaatcagatcggcagagaccagagccaaacccctgtttatcctagcctatgagctgcctgatttaaagtaacctctgttcccattccagaatcctagatttggagaaaaatctaagttgaaacctcagcgtggcagtccccagctgtaccccccattttttaatcaccccctcatccccaacttcagacctcaaagttttggctgtttcccttttttttttttctttcctgcccacttcgtgaacgggatggagggacggggtcccgggaccctgcagatgggagcgtgcccgaggccctgcctgctcacccgctccccggagagccagacaaaaagaaacagcatgtttctgaagacttgtgtgtcaggctttgtgcacatttcagacaggagccttcacggggctgagtggacacaaagccgggtgtctgaattcctgggccccagacactgatctacatctaaatagaagaaaaatcaattaaacaatctttggaaatccctccgagcttcggggcttctcggatggtgaaggatggcagctttttatcttgtggccagagaggaaatagcccttctccttggttctcctctctccagacctgcagtttccactttttgctttcttttttttctggagacacagtttcgttcttgttgcccagactggagtgcaatgtcacggtatcagctcacttcaacttccgcctcctgggttcaagcgattctcctgcctcagcctcccttagtagctgggattacagctgcgcaccaccaggcccggctaatttttgtatttttagtacagacgaggttttgccatgttgaccaggctggtcttgaactcctgacctcaggggatccgcccgcctcggcctcccaaagtgctgggattacaggcgtgagtcactgcgcccagccccacttttcactttcttcccaaagtttaggacacaagattccccaccattcgcctgccaaaaagatgccaaccttcttagatctgattgtttcacttaaacaaaacaaaacaaagtttaacatatatacacccagaacactcattagtgaaattttaggcctgatatgatggctcacgcttgtaatcccagcactttgggaggctgaggcaaggagttcgagactatcctggccaacatagcaagaccccatctctaaaaaaaaaaaaatacaaacagccgggagtggtggcgcatgcctgtagtcccagctactcgggaggctaatatgggaggatcacctaagcctggggaggtagaggctgcagtgagccctcatagtatcactgcactctagcccaggtgacagagctagaccctatctcaaaaaaaaaaaaaaaaaaaagaaaagaaatttggccaggcacagcggctcacgcctgtaatcctagcgctttggaaggctgaggcgggcagatcgcttgaggtcaggagtcaagaccagcctgaccaatatggtgaaaccctgtctctactaaaaatacaaaaattagccagaaatcacttgaacccaggaggcagaggttgcagtaagccgagattgtgccactgcactccagcctgggtgacaaagcgagactctgtctcaaaaaaaaaaaagaaattttacatatgtgcacccccaagggccaggtcaagatctcgaacattctctggttcttcctcgcattcttcacagaagccccacatagcctctcccccaagtactcccaagccctcccgatgtaaacctctgcagacttttttgcgccagtaggtgaattttgcctgttccagaagttggcaggaacaagcagcttccaggtgccacacctctgcgagaaccgcccctggagttgctgcttggttccttcctgtcctggatttgcctgttagaaaggtgtcactgctggatgggttgaatccattcctccaaaaaatgtgccctggagtgttgttggtgtaatgcaggcaactgttgccaggcgtcacctccacccaaagatgggtgttttgttctgcactgtgggtggcaattgcttcctgccgtgaccgatttttcggaagctcctcatccttcagggaccccctaagtacttctctgtgtctctcccctcttgctccctctgggtctctctctgtctctttcctttcttctatctgttcatatctgtgtctctcttcatctctctgtctcttctgtctctctctctgtcactttcaccttctctatctgtgtgtgtctgtttctctcttttttttttttttttttttttttgagacagagtttcgctcttgttgcccaggctgtagtgcaatggcacaatctcagctcaccgcaacctccgcctcccaggttcaagcaattctcctgcctcagcctcctgagtagctgggattacaggcatgtaccaccacgcccagctaattttgtatttttagtagagacagggtttctccatgttggtcaggctggtcttgaactcccgacctcaggtgattcgcccacctcggcctcccaaagtgctgggattacaggtgtgagccaccgcacccggctgtttctctctcttgtgtctttcttcctctccctctcgtctctttctgcctctctctctctgggtttctctgttccttcccacctcgtcccttctttctctctccgtttctctctttctcgctctcttttttttttgagacagggtctcactctgtcgtccagactggagtggagttcaatggtcgattgaacgagtgaggtgagcaatctcagctcacctcatccttgacctcccgggctcaggtgatcctcccgccccagcttccccattagctgggactacaggcatgcaccaccacacccagctaatttttttttctttctttctttcttttttttttttttttttgtagagatgggatttggctatgttgcccagactggtctcaaactcctgggctcaagccatcctcctgtcttagcccctcaaagtgctgggattacaggcataaacctccatgcccatccttctctgtttctctctgtctccctgtctctctctctctctgggtcttactatctcttcccctttctctctcttcctctctatctttgttaatctccgtgtgtctcagtttctctccctgtgtgtgtctctgtctccttgtttctttctctctgaatctgtctctttccccttctctctctccccatttctgtttctctctgactccatctctctgtctctgtctctccttttttttttttttttgagacagggtctcactctgtcacccaggctggagtacagtggtgccatcttggctcactgcaacctctgcctcccgagttcaagtgattctcccgtctcagcctcccaagtagctgggactacaggtgcacgccaccacgcccagctaatttttgtattttcagtagagacggggtttcaccatattggtcaggctggtctcgaactcctgacctcgtgatccgcctgccttggcctcccaaagtgctgggattacaggcatgagccaccgcgcccggcctgtctccgtctcttctgatcctttctctttgtcccctgggtgaagtcatgcccacagcataggtggaactgtttcccacccgcagtgttcaggaggtgggagttggtggggtacagaggggacccccccttgtctttcctgggatggcagcttcccccagcaccccaagcacgaggcaccatgtgtctcgtgtgtcccgtctcccctacctctcagggtggactggggcactggctgtgtttctcttccgaggaggtgcaggtgggtgttaagggctggggagctccggggctcggggccatctggggtgtctcttgccaaagctgggtgaggaggacccgggtcacagaacttggtaacatcacgggacaattgctgccacagtgagtctagacagacctgctaaggatattaccagggaacaaagagggtctttgtcgtggggtcaggggaatcggtcagacgaggctgcgcggcggggtcctgtcaggtagatggggtgtagacaatggggcgtctgcccgagccccgtcctttcacggtgtatgctttgatggtgcatgaggccgggtgtgctgctggcaaagtgatgtgggacttggggtgccctgccccccttctcccggaggagaaccatccaacccttttggaacagagcgtgttcagaggctaagacttcagccagattaccagccacacacttccttctagtgccagatacactgtatggcaggtggctccctgccgttaccctatttaaaattgagtgataatttacatcaggcaatgtgaacagaccttaagtttccctatcactttggtgagaaactttttttttgttttgagatggggtcttgctctgttgcctaggttggagcgcagtggtacaatcatagctcactgcagcctcgacctcctgggctccggtgatcctcttgcctcagcctcccaagtagctgggactacaggcatgcaccaccatgcctggctaattttttaaattttattttttgtagagatgggatctcactatattgccctggctggtcttgaacttccgggctcaaatgatccttccacctcggcctcccaaagaagctgggattataggtgtgagccaccgagccctgccatcaggtgggtcttggcaaacacacacatgaacacctctcttgtgactgcaggtcttggggtatgtgtatatgctgacagtggttttctttctttcttgtttttttgtttgtttgttgttttttatttttgtttttgagacagaatctcactctgtcatccaggctggagggcagtggtgcaatctcagctcactgcaacctccacctcccgggttcaagtgattctcatgcctcagcctcctgggtagctgggactcagctaatttttgtatttttagtagagacagggtttcgccatgttggccaggctgatcttgaactcctggcctcaagcaatcctcctgcctcagcctcccaaatcgctgggattacaggtgtgagccacccacccctgaccctatttttctgaatacagctttccctgttgatttttaaagtaacacatcccatgagactcaagacatcaccttgtgcccattagggaaaagacagaaaagaggcagatctgttgatatgggactatgggttgttttattttattgtttttgattttgtaaaacactgaaatggtttaaaagtcaaaatcatgcgatgagttttttgcatagaagtctccctcccgtccccatcgccgctcccattccttccttgcccagaaggtggcacagtctcgccacgggtcatgccgggaaatccctccaggttggtccaaacagagattactcattcttttaaatattttcattttgtttttaattttgatgaaatccagtttatcaattatttttcttttattgtctgtgcttttcgtgtcatttggtgtgtgggggctttttggtcttttttcgagatggggtctcactgtgttgcccaggctgacctcaaactcctggcctcaagtggtccgccccagtagctgggattacaggcatgagccactgtgcctggctgctgatttgttttttgtttgttggtttgttttgagacacagcgagactctagctggagtgcagtggtgtgatcttggctcactgcaacctccacctcccaagttcaagcgattctcctgcctcgccctcccgagtagctgggactacaggcatgcgacaccacgcctggctaatttttttgtgtatttttagtagagacggggtttcaccatgttggccaggctggtctgaaactcctgacctcaaatgatctatccatctcgaccttccaaagtgctgggattacaggcatgagccactgcacccggcctgttgatttgtttttaagagaaaagagctctgtgggtctcctcttggagattaggggaagacgcatttataaacggtaaaattttctcctctgggacgtattgaatatgaggtgggaaaaccaggcttcagtgtaacgatctctctcaatagcaagtatgtattgactgatctgcagtgcagcaatgcccctacttggcatttatgccccacccatcagcatgagaagtttgcatgaggacgttcactgcagcttggctttacagtaaggaaaattagaagccacttagatgttccaatgtaggggaatgtttaaatccatagcgaccagtttctgaggtggagtattatgcagcagagaaaaggatgcgctgagatctccgtatagtaatgtagacagatctctgaaatagactgctgagtggagcaaacagagttgcaggataaaatcaatggctgggcacagtggctcatgcctgtcatcccagcactttgggaggccgaggtaggaagatcgcttgagccctggaggtcaaggctgcagcgagcgctgatggcgccactgcactccagcctcagtgaccagagctggaccctgtctcagaattgcttttttactgcctatgaatggaaaagcagcagtaaatctttttaaaaactttacttttggccgggcacagtggctcacgtctgtaatcccagcattttgggaggccaaggtgggcggatcatgaggtcaggagatggagaccatcctggccaacatggtgaaaccccgtctctactaaaaatacaaaaataagcggggcatggtgcctgtaatcccagctactcgggaggctgaggcaggagaatcacttgaacccagaaggtggaggttgcagtgagctcagatcgcgccactgcactccagcctgggtgacagaatgagactccatctcaaaaaaaccaaacaaaactttacttttaagtgctgttggactttgtctcaatgcaatttttaaaaaaggataaaatcaggccaggcatgatggctcttgcctgtaatcccagcactttgggaggctgaggcaggcggatcacctgaggtcggaagttggagaccagcctgaccaacatggagaaaccctgtctctactaaaagtacaaaattagccaggcgtagtggtgcatgcctgtaatcccagctacttgggaggctgaggctggagaatcacttgaacccaggaggtggaggttgcgatgagccgaaatcccgccattgcactccagcctgggcaacaaaagcaaaactccgtctcaaaaaaaaaaaaaaaaaagaagataaaatcgatgtaaaaacaagccagatgtggtggtacatgcctgtagtctcaactaaggctaaagtgggaggatcgcttgagtctaggagttcaagaccagcctgggcaatgtagcaagaccccatctctaaaagaaaaaattctatgggatttctcaggtgtgtgaataatagattagaaacaggtctgcatggggctgagtgcagtggctcatgcctgtaatcccggcactttgagaggccaagggggggctgatcacttgatctcaggaattgaagaccatcctggccaacatgacgaaaccctgtctctactaaaaatacaaaaattagttgggtgttggccgggcgcggtggctcacgcctgtaatcccagcactttgggaggccgagatgggcggatcacgaggtcaggagatcgagaccatcctggttaacacgatgaaaccccgtctctactaaaaatacaaaaaaattagccgggcatgctggtgggtgcctgtagtcccagctactccggaggctgaggcaggagaatggcgtgaacccgggaggcggagcttgcagtgagccaagattgcggcacgccagcctgggtgacagagcgagactccgtctcaaaaaaaaaaaaaaaaaaaaattagttgggtgttttcccagtactcgggagtactgtaatcccagtactcgggaggatgaggcagaaggaactcttgaggccgggaagcagaggttgcagtaagacaagatcatactactgaatgatttttgataatccatctcaaaaaaaaaaaagaaagaaagaaacaggtctacatgatgtgtgccctgtcacctctgtggtgtgaagatgggaattagtgtaggtttgttgacggaacggatggtggggcctttgaaaaatataattgtctttttttttttgagacagagtcttgctctgtcgcccaggctagagtgcagtggcacaatctgggctcgcactgcaacctccacctcccagattcaagccattctcatgcctcagcctcccgagtagctgggagtacaggtgcgcaccatcacgcccagataatttttgtatttttcataaagacagggtttttccatgttgaccagggtagtctcgaactcctgacctcaggtgatcctcccgcctcggcctcccaaagtgctgagattacaggcgtgagccaccgtactcagccacctctcactattattcaactttttctgggatactgctgagttacttggaaacaggttgaatcttttttttttttccttgagacagagttctactcttgtcacccaggctggagtgcagtggcacaatctcggctcactgcaatctctgcctcccaggttcaagccatactcctgcctcagcctcctgagtagctgggattacaggcacctgccaccatgcccggctaatttttgtattttttagtagagacggggtttcaccacgttggccaggttgatcttgaactcccgacctcaggtgatccacccacctcagcctcccaaagtattggaattacaggcatgagccaccgggcctggttcatttttttttttttttgagacaaggccttgccccgttgcccaggccatagcgcagtggtgcaatctttgctcactgcatgcagcctccccctccctggctcaagcaatcctcccaccttagcctcccaattagctgagactgcaggcatgtgccaccacatccagctaatttgtattttcgagttttgccgtattggccaggctggtcttcaactcctgggctaaagcaatcctcctgccttggcctcctaaagcactgggattacaggcatgagccactgtacctggccaaattaatcattttaaagtatataattgcatggcattaagtacactcactgtgttgcgcaaccatcatctctatctagttccagaacattccatcacccgaaaaggagaccctgtccccatcagtagccattctccattcccctccctcagcccctggcagccactcgtctgcttcctgtctctatggatttgcctgctctgggcatttcatatcaatggaatcatacaatatgtggccttttgtgtctggcttctctcactcagcatcatgttttcaaagttcatccacattgtaccacggatcagtgcttctttccttttcatggctgaatcgtattccatcggatggatggaccatatttcatttatccatctgttgatgggcatttgtgctatttctaccttttggcttttgtgaatactagagaggcttctttttacaaattggacacagtggctcacccctgtaatcccagcactttgggaggccaaggcaggtgaatcacttgaggtcaggagtttgagaccagcctggccaacatggtgaaaccccatctctactaaaaatacaaaaattagctgggcgtgatcccgcatgtctgtaatcccagctactggggaggctgaggcttgagagtcacttgaacccaggaggcagaggttgcagtgaaccgagatcatagcactgcgctccagcctcggtgacagaatgagactctgtctcaaaaaaataaaagactcttgggaggcagaggcaggtagatcacgaggtcaggagatcgagaccatcctggctaacacagtgaaaccccgtctccactaaagatagaaaaaattagccgggtgtggcggtgggtgcctgtagtcccagctactcgggaggctgaggcaggagaatggcatgaacccgggaggcggagcttgcagtgagccgaggtggcgccgctgcattccagcctgggtgacagagtgagactctgtctcaaaataaaataaaataaaataaataaaagactctgttgcagggcacagggtctcaccctgctgcccaggctggagcgcagtggcacgatcatagctcactgcaacctcaaccgcctgggcttaggtaatcctcccatctcagcctcctgaatagctgggaccacaggtgtgcaccaccatgcccagctaatttttaaagtttttgtagaggccaggtctcactatgttgcccaggctggtctcaaactcctgggttcaagcgatcttccagcctcagcctctcaaagtgctgggattacaggcatgagccactgcacccagccccatttctaaaataataacagtaataggataatggcagccaatgtcatttgaacacttaaaatatgccagacatggtgcttagaactgttagcgtgagtgagcacatttaattttgaaagctatcctgtgaggtaagtcgatactttttttttttttttttttttttttgagacggagtgttgctctgtcacccaggctggagtgcagtggcacaatcttggctcattgaaagctctgccttccaggttcatgccattctcctgcctcagcctccccagtagctgggactacaggcacacgccgccacgcccagccaatttttttgtatttttagtagagatggggtttcactgtgttagccaggatggtctcgatctcctgacctcgtgatccgcctgcctcggcctcccaaagtgctgggattacaggcatgagccaccgcacctggcctttttttttgagatggagtttcgctcttgttgcccaggctggagtgcagttacgtgatcttggctcactacaacctctgcctcccgggttcaagtgattctcctgcctcagcctcctaagtagctgagattacaggtgtgtgccactgcacccagctaattcttgtatttttagtagagatggggtgacaccatgttggctagactggtctcgaactcctgacctcaggtgatccgcccaccttggcctcccaaagtgctgggattacaggcctgagccatcaggcctagcctgatactctgttattcccattttacagatgaggaaactgagactcagagagattaagtggattgcccaaggtcacacaggcaggattgagtccaaggagcctgggatttaaccccagggaccatagaatcatgtcaccttccatagagatacagagagactttgaggcaagagggtggggaaggaaatgaggggctttgaactaaatcaacacacacccttgccatcctgcagaatgagtctggagaacgcctgtttgtttcaccccccagagagcgcattatccccatagctgtcatctggggccatgacactcccactctcctctcttccaggagctagaaaagctaggccttggcgacagcgtggacctgcatgtgtacgagattccggttgagtaccaaacagtccagagactcatccccgccctgtgggagaagcacagtccacaggtgagtggtgccaaggggcggcacttcctcatcaggacttacaggttggcacccttcatgtggaggacttaggtggctttggtcctgatcagatcacgtgaccaatgccatacagccttgtcctcaaaagggcttttcaggccgggcatggtggctcatgcctgtaatcccagcacgttgggaggccgaggcaggtggataacctatactcaggagttcgcaaccagcctgggcaacatggcaaaaccctgtctctactaaaaatacaaaaaattagccgggtgtgatggtgggcgcctgtagttccagctactcgggaggctgaggcaggagaatcgcttgaacccgggaggcggaggttgcggtgagccaagattgtgccactgtactccagcctgggcagcagagcaagacctgtctcaaaaaaaacaaaaaaacccaaagggctatccaggccaagggtagtggctcatgcctgtaatcccagcactttggaaggccgaggcaggaggattgcttgagtctaggagtttgagaccagcctgggcagcatagtgagatcccatctctacaaaaaaatttaaaaattaggcatgatggtacatgcttatagtcccagctactcagaaggctgaggcaggaggattgcttgagcccaggaatttaagactgcagtgagccaagatttttatgccactgcactccagcctgggcaacagaacaagtctcttaaaaaaacaaacaagaccaggcatggtggctcacgcctgtaatctgagcactttgggatgctgaggcgggtggatcaccggaggtcaggagtttgatcccagcctggccaatatggtgaaaccctgtctctactaaaaatacagaattagccaggtgtggtggcgcatgcctgtaatcccagctacttgggaggcggaggccagagaatcgctggaacccaggaaggggaggttgcagtgagctgagatcgcgccactgcactccagcctgggcgacagagcaagactccatctcaacaaagaaacaaaaacactgcattggcattttaacacttgcatagcagctcattatttattgaactaactccgctggatggctagttaacttgtttgcagtatttgattttgataacaagaacagctgcagtgaacagcccttcatgtttcaaattcttgcctgtcttacatggcatacctttttccaagagtgactgcagggtctattctagcagcaagaggtcagaaacaacacaaccccaggcagagctcattaaggatgctgccttttccctggcctcagggggacccctctgagtcccacgggcaggccatgttaagtcctgcccctgtctgtgtgcagctggtggtgcatgtgggggtgtcaggcatggcgaccacagtcacactggagaaatgtggacacaacaagggctacaaggggctggacaactgccgcttttgccccggctcccagtgctgcgtggaggacgggcctgaaagcattgactccatcatcgacatggatgctgtgtgcaagcgagtcaccacgttgggcctggatgtgtcggtgaccatctcgcaggatgccggcaggtagggccctgtggggtgggagtgagtggggatttccctcctccacccactgagcctggtgtagaacaagccaagcgtgttgaccttggcctctttggaccaagcactcagtgtatactaggcacagagccaagtatttgtacgtagcaggtgccgttggttctgctcctgggactcatggatctgcccacttctccccaccatcacggtccccaccaaggcccccagcatctcccacctggacactgccccagcctccatctcagtcttcctccctgctgcctccaccccaacccaagcagtcagtttctgtgttaatttcctggagctgctataacaaatacccacaaactgggtggtttcatataacagaaatgtattgtctaacagccttggaagtcagaagtccaaggtcaaggtggtagcaggactggttccttctggaggtgctgagggtgagtctgtcccaggcctctctcctgcagctggtggctgctggccatccttggcttgtagacacatcgctccagtccccgcccctatcctcacatcactttcttccctttgtgtgtggccgtgtggtcttcttattaggacaccagtcattatatttaggactcatcctaatccagtatgacttttttttttttttttttttttttgagacggagttttgctcttgttgcccagcctggagtgcaatggcgtgatctcagctcactgcaacctccacctcttgggttcaagcggttctcctgccccagcctcccaagtagctgggattataggcatgcaccaccacgcccggataattttatacttttattagagacagggtttctccacgttggtcaggctggtctcgaactcccgacctcaggtgatgcacccacctctgcctcccaaagtgctgggattacaggcatgagccactgcgcccagccgacctcatcttaatttaactaattacatctgcaaagatcctctttccaaataaggtgacattcttttttttttgagatggagttttgctcttgttgcccaggctggagtgcaatggcgccatctcggctcactgcaacctccgcctcctggctcaaacaattcttctgctccaggctaccaagtagctgggattacaggcgtgcatcaccagacccagcaaattttttgtatttttagtagagatggggtttcaccatgttggtcaggctggtctcgaactcccgatctcaggtgatccaccctcctcagcctctcaaagtgctgggattataggcatgagccaccaaacgtggcccaaataaggtcacattctgaggtcccaggtgaacacgaatgttgagggagatgattctattgcaaaaggtcttttataaatttaaatcagggccaggcgcagtggctcatgcctataatcctagcacttcgggaggccaaggcaggaggatcgcttgagcccaggagttcaagaccagcctgggcaacataaggagaccccatctgaacaagtaaaaaaaatagcaggctgagacaggaggattccttgagcttggagttcaaggctgcagtgagctgtgatagcgccactgcacttcagtctgggcaacagagcaagaccctgttggctctaaataaataaatgcatgtgttcctttcctagaccttccctatggctcccattgcacatagaataaaattccaaccctggcccttggcccgcctctccaccccgctctgcctctactcaccccatatccattgcactccagacacatgaaccagcttcctcctgctcctcaaacacaccaagttcactccagcctcagggcctttgaacaccctatggcctctgcccagaacaccttcctctgggaacacctctttccagtctttttttttttttttttgagatggagtctcgctctgtagcacaggctggagtgcattggcgcgatcttggctcactgcaacctccgcctctgacgttcaagtgattctcctgcctcagcctcccaagtagctgggattacaggcgtgcgccatcattcccagctaacttttgtatttttagtagaggcggggttttgccatattggccacaccagggtggtctcgaactcccgacctcaagtgatccacccacctcagcctcccaaagtgctgggattataggcctgagccaccgcgcctggccctctttccagtcttaattccaacacgagtcacctccttgtgacttgtaggcctctccaactccccagaccaagttataccctcccagcaccagcttcctcacttttccctaatctgtgcgcttgtccaactcaaaggcagctattggtcaatgcagttgagtagctgaaggaaggaatgcctggatttaccatcaggatttttgtttttggagacaggatctcgctctgttgcataggctggagtcaagtagtataatcacagctcactgcagcctccatctcctgggattaagtgatcccccgcctcagcctcccgagtagctgggactgcagatggacaccaccacgtccagctaatttttgtattttttgtagagatagaatcttgctacattgcccaggcaggtcttgaattcctgggctcaagtgatccttgtgcctcggcctcccaaagtgctgggattataggcaaaagccaccgcacaccactgagttctttttaaagctaactttttctcttttttaattgaaaactaattgttatttagttgtttatttattttgacaggatctcgttctgtatcccaggctagagtgcagtggcaaaatcacagctcattgcagccttgactttttgggcttaggtgatcctcccacctcagcctcccaggtagcacaaccaaacccagctaatttattttttatttttattttttttgagacagagtcttgctctgtcgcccaggctggagccaggctgcagtattgtggcacaatcttggcttgctgcaacctccacctcccgggttcaagcgattctcctgcctcagcctcctgagtagctgggattacaggtgcccatcaccacacccagctaatttttgtatttttagtagagatagggttttatcatgttggccaggctggtctcgaactcctgacctcaggtgattcgcctgcctcggcctcccaaagtgctgggattacaggcatgagccaccgcgcctggcctaattttattttattttagtttttttgagactgcgtctagctttgtcacccaggctggagtgcagtggctcgatcttgttgcactgcagcctccatctcccgggtcaagtgattctcctgcctcagcctgcagagtagctgggattacaggcacccaccaccacacccagctaatttttgtatttttagtagagatggggtttcaccatgttgcccaggctggtgttgaacttctgagctcaagcaatatgcccaccttggcctcccaaggtgctagaattacaggtgtgagcctccgcacccagctcaattttctttctttttttttaaagacaagagtttcgctcttgttgcccaggctggagtgcaatggcagaatctcagctcaccgcaacctctgcctcccaggttcaagtgattctcctgcctcagcctcccaagtagctgggactacaggtgcctgccaccatgcccagaaaatttttgtatttttagttgagatgaggttttcagcatgttggccaggctggtcttgaactcctgacctcaggtgatccacccgccttggccttacaaagtgctgggattacaggcgtgagccaccgcgcccggccacccagcccaatttttttgtatttttggtagagacaaggtgttgcaatgttgcccaggctggtctcgaactcatggagtcaagggatcctcccacttcagcctcccaaagtgctgggactacaggtgtgagccaccatacccagcttccatcagtctctttataaaattaatttttaatcataggtaactctagaacatatcctcatatgtctaattgggaaaaattctcattccctctctttttccatagcggtccctctgataagtcagacacggaaaccatgaagctcctactgactgacacgtttccgtacatatatacatcacttggcctgctgctttatgattttatcttgttttgctttgcttttacgtggatggagtcacatggcgaaagtcacacttactgagaattctcatccttagttttcatttgtgagcgttcaacatgcatctggcgagttctccatttttttctggctgtaccacattccttgtaaacagattcataggattccatggtgtggataaaccagagtttactaagccactccctgtcagtgggctttaggttgctttctgttttcctgcttttatacataatacgatggggagcatccctgtttgtactttcttgtacccttgtgcagatggttcctgagggtagatctaaaaacgggaaataggccaggcgtggtggctcacgcctgtaatcccagcactttgggaggccgaggcaggcgaatcactcgaggtcaggcgttccagacctgcctagccaacatggtgaaaccccgtctctactaaaaacataaaaattagccggatgtgctggcaggcacctgtaattccagctactcgggaggctgaggcaggagaatcgcttgaacccgggaggcgaaggttggagtgagccaagatctcaacactccactccaacctgggtgacagagtatgactccgtctcaaaaaaataaataaataaaaataaaaactggaaatagggccaggcacggtggctcacacctgtaatcccagcactttgggaggctgaggtaggcggatcactacaggtcaggagtttcagaacagcctggccagcatggtgaaaccctgtctctactaaaaatacaaaaattagccagacgtggtgtggcccacgcccgtaatcccagctactcgggaggctgaagcaggagaatcacttgagccgaggaggcagaagttgcactgagctgagattgtgccactgcactccaacctgagcaacagagcagactctgtctcaaaaaaaaaaaaaaaaaaagccagtggtggtggtgcacacctgtagtcccagctactcaggagggtggggtaggaggatcgctggaggccaggttgcactccaaactgggtgacagagtgagaccctgtctcaataaacaaaaaatggaaataccaggttgtaaagtctgggtgattataattttactagcctgacaaattgccttccacacggggacaaccagcgtgccttcccaccagcaatagctcactctgcccatttccccacatgtgccacagcactgggagttatcaagttttttttgtttgtgtgtgtgtgtgtgtgtgtgtgtgtgtgtgtgttttaaagagacaggatctcactctctcacccaggctgagtgcagtggtgcaatcatggctcactgcagccttgacctcctgggctcaaacaatcctcccgcctcaacctcctgagtagctgggactacaggcacgtgccaccacctctggtgattttttttcatctttgccaacctggggagggaggagagtgttgttccatcttgtgggttgctggtaaggtcttcccttggatttggatgggtgctgtcaccttggtctacggattgcccctctgaccccgttttggtctctctcttacccgccacgccctgcggcttagatatctctgcgactttacctactacacctctttgtaccagagtcacggtcgatcagccttcgtccacgtgcccccactggggaagccgtacaacgcggaccagctgggcagggcactgagagccatcattgaggagatgttggacctcctggagcagtcagagggcaaaatcaactattgccacaaacactgagggacgctcaggtctcctaagacctcatcctgctggggaccccacgaggggacatccaccctctggggtgtggccaggaaaagacaagctcttcagcttggggatccgatctggaagagagattctgatctgcccacctcctcttcctccttctctacaaaagctccggttgattcgagggaagtggtgaaaatttttttttctcccattttcctccctgcatctggggacacagctgccgtgaccagggaggccagcctgggaggtccagatgcccagggagaatcttggtctggtgaatccatgagctgcgataccacggctggggccatatgttcacctgctttcctgtccgttggtgaaggaatttcagaattcattttatatccaagactggcttttaccaaatttaaaagcctctcaatgcgtcctcgaccttgaactgtgctcaacagcctggccctttctggggccaccctgggatatggctggctggctggctttctttctttctttctttctttctttcttgctttctttctttcttgctttctttcttctctctctctctttttttttttttttaaatagtgctagtttgggcacagagtaatttatattccctttggttaaaatgcaggctttttagccaacaacaaaagtgttttccccccacccccactcgcccaccagggtgatgccacttttgcctcctgccctgaaaattggacttaagatgccatgtcttggccaggcgcagtggctcatgcctgtaatcccagcactttggaaggccagggtgggcggatcacctgagatcaggagttcaagatcagcctggccaacatggtgaaaccctgcctctactaaaaatacaaaaattagccgggcatggtgatgagtgcctgtagtcccagctactcgggaggctgaggctggagaatcgcttgaacttgggaggcagaggttgcagtgagctgagattgcacagctgcactccagcctgggtgacagagcgagactctgtctcaaaacaattggacttaagatggcatgtctttgttttagggccaaaaatgaggcccccttgcttaaggcatggggtccgtggccaggcaacggggtgggactgctgccccagatgtggccatgggggtcgtggtcctttcaacaccaagctatgagctgtcgccatggagaccagggccacctgtggaaaggcggattttgtctgcttttgacttttcttttttaatatgtaaaactccacatcagcggaaacccccccctacttctggcctggagcttcagggttttggtgctgggacgagtttgttgttctccttagcggggtggcgcggggggctcaaaacgggggcgcgggggctggagttggcagagctctgcatgtcccggcatgtctgagcaggaggaattccgggcggccaaagggttttatgtagattgcttttggacactcgcccaggagtcaggagttgatttttatctcacttcctggtaaccttgaacttaccaggcagggatgagatgacgtaaacttcctcagatgatgtaagttcagccacatcttgctgcccattagggagagaggacgacccccacagtgaaagtaattgagtgaaatgcacgttctggaaatcagtttctattttggcctggaggaatgtggctatactgcttccctgagtgtgacacagttggaatctaatcttgttggtttcccaacatctaggtttttgtttgtttgtttgtttttatgatagggtcttgttctgttgaccaggctggagtacagtagtgtgatcatggatcactgcagcctctacctcctgggctcaagtgatcctcccatctcagcctcctgagtagctgggactacaggcatgcaccaccacacctggctaatttttaaattttttatacagacagggtttcaccatgttgcccaggctggtctcgaactcctggactcaaactgatcctcctttctcggcctcccaaagtgctgggattacaggcatgagccactgcacccagcccagttctttcttaaaacagctgagagttttgttttcttcagcgttcaccttccttgtctccagttccgatgctggcagtggttcctacctctgttgggtttctagatagtttgggaacggggttgatgggtttctgtgaaacacattttccaagtcttgggctttctctggaggggaaggtggatgctggcgggtgacttgcagtgggcgcctggcagtgggtgtggactgtaactgacaggtggaaatgagtagggacactattgttccctccatgccagcttttttttttgctggaaatgccccctccacacccctggtagctctgtgtcctgagaaatccagagtgtgggagacatcactgcatctgtccccccagcttctgtgaagggaagctgtggcctcttttgaatgtggggaacaactgaagactcaggggtcacccagaggtctggtggaaagcaacttcaggtttcatcttgctctattcctcaaaggtctggtctgtgggcctctgaggagaaaacaggtctagccaagacagggacaaaatggggaaggggatgtgccaggcctgaactgagctaagcacctgccccgggctccacacttccatctttcttttgtcttcatttcacctctgtgtttaaagcactgtgtgacatagctccttagagatataacctattgtctgctcattgtcacgtgtgtgtgtgtcatctttgtattcttgcagtggtttcacatttccttacccagtcaagccagtatcccatccttcctcataatgcacaacatttggctcattttatttttctcattgttattttttatttttattttttgagatggattctcacactgttactcgggctagagtgcaatggcgtgatctcggctcactgcaacctccacctcctgggtttacacaattctcctgcctcagcctcccgagtagctgggattacaggcgcccgtcaccacacctggctaatttttgtatttttagtagagatgcagcttcaccatgttggccaggctggtcttgaaatcctgacctcaggtgatctgcctgccttggcctcccaaagtgctgggattacaggtgtgagctactgcgcctggccaagttttttacaaatatttttcttttggtggaactcatctgtgcactctctggtgtgtttttccacctttgttgggtcttggcttaaaatatcctcatgtgggctaggtgtggttactcacacctgtaatcctagcactttgggaggttgaggcaggagaatcccttgagccaggagttcaagaccagcctgggcaacatagcaagagatcccatatctaccaaaacatacaagaattagccagatgtggtggtgcatgcctgtggtcccagatactcaggaggctgaggcaggaggatcacctatgcctgggaggttgaagccccagtgagccatgatcacaccactgtagtccagcccgggtgacacagcaagactctgtctcaaaaaaaaaaaaaaaaaaaatcctcatgcaagaagggaaggaccaagtcccattccctcttgcctcattttcagagcctggggtaggggctacaggtggcataggaagggtctgcaaggtgggtgggacttggcaggtgttgggaagaggaataggggtggcaagtgtcaatggtgaaaagacaggctgaggggtgtggtgggaaggctgggggagaaaggtgagaagtgattgggggggcttccctgatgagtcctcatggagggtgctgaggcagggaacaggggtgcagggacagtgatcagggcacctggtaccctgaccaacttgatgatggcatctcttttaagatgcccaagtctgcgcacttttattcctttattcggcccctagcaccccctccccaccccaaagaaggtcagttgcatgcgtgtggggatgtagctcaaaaaagaaataagatggagtggaaaggaaagaaaggaagaagcaggaattcaaggtgggtgggctgagcttggggccacctagcccacctgctccaatcaagggctggaacaaacctgaggccacttggagaggcagggctgggcagggacagggggtgggggccgaaatcacagcttccccatcagagccagatgtgtgaaggaaatgtcccagatggcagtagtttctcggcaaggaggggaatcctggagatggttcatgtctgtgatcccagtgctttgggaggctgaggtgggaggattgcttgagcccgggagttcgagaccagccctgggcaacatggcgagaccccatctctacagaaattaaaaaaaaaaattagccagttgtggtgtcaagcacctgtagtcccagctacttgggaggctgagttgggaggcttatctgagcccaggaggtgaaggctgcaatgagccatgattacactactgtaccccagcctgggcaacagagcaagaccctgcctcaaaattaagaaaaaaaaaaggggggccaggcgcagtggcttatgcctgttatcccagcactttgggaggccaaggcagactgatcgcttgaggccaggagtttgcgaccagcctggccaacatagcaaaaccccatctctactaaaaatacaaaaattagtcaagagtggatggtgcgtgcctgtaatcccagctacctgggaggctgagacaggagaattgcttgaacctgggaggcagaggttgcagtggtgtgagatcacgccactgcattccagactgggcaacatagcaagactctgtcacaaaaaaaaaaaaaaaaaagaattccctgctctgcttttctgctcgttgctggcatagaaacatctagaacagaaagtatccactctggggcagatgggagagctggaaaagtagattcaagatgccttttagtcttggaagtttcttccaggaagcaagaccagctggtatgtttacacctgcactccagtgccctggggaggtgaccaggtggagggggatggctcatggaaatctgtcccgcacagctggcccccttttggctgccactgtctagactgttggcctttgacctctctgcctcttgtggcgtctgaacctagacgtcccttttggagacagctggacaaagccctattctccgcagccccagcctctatcctgaggcctctgggagctgcgtgacggccagcatggggtgctgatcatggtcaaggaggcaggtctttgccaggttgccccatgcagccacccatcctcagcatcctaacttgagggggcaggagagggctttgtttttataatccggattaaatttcccttccctgggcacaagtgcctcatgagggcccggggctgctggttgggagggaaagcatccccgtttttgcagtgaggaggccggccgagggctggggttccacttagacccttggcagaatggctgttgaggggcaggcgctgcccagtgcccacgtctggaaagctaattcccgggtggacgctgaacatacctgctgagagactctgtcccctggtttccaggacagttgtcacaagctgagtggggggggactcccaggacttgagggacccagtcccaccccaaactgctccccctcccccaaattccctttctcctcctgctctttctccccgctgtgcctcccccagttacccacagaagtgcctgcctctccagcgctcacagaacacacaaaaagggacaggaattggtcactgggtagtggccgtggctcctgacgatccagaccagcgtctggcccaagccattcagaggtggggtctggggcctgggggttttgtgtcgtgacactttgtctcaaggagattccacatagggatttgaattaggctttctgcttgccaaggcctgtggcatctgagcctggctgagggccgggcaagcctcccctgagcctttggaagccgagttcactctctgcctgcccaggggagcaccggcttggttctgggggctcctctaacatctcaggtttttatcttgtcttaaatttctttctaggaaaaaacccttccctgccaaaggtgactgtgttttctgccgccgaaggagggcccggtccctccaggctcagtgtggcttctccctgacccccgccctagaacttttgccagtgccttttctgaaactcctgtgtcccgggccccccaggcggagaaggatatgccggattctgcctggggctgggctctaggagaccccaaatttgacaccacagaaagcaaataaaacacttgaaatacgcatacatttcctgtgtgtccttttgtggggctggagttcagctgggtgcccggggatagaggggaccccgtgtcactgggtttctattctcggtggtgctgggcccagggcagctggtgaccatgtgctgagtgagcgagaggaggggaattctgcctccagtggtctccttcctcaaaatcagaggcctggcccagcgcagtggctcacacccggaatcccagcactttgggaggccgaggtgggtgaatcacctcaggtcaggagttccagaccagcctggccaacatggcgaaaccccgtctctactaaaaatacaaaaattagccaggtgtggtggcacgtgcctgtaatcccagctactcaggaggctgaggcaggagaatcgcttgaacccgggaggcggaggtcacagtgagccaagatcgcaccactgcactccagcctgggcaacagtgtgagactcagtctcaaaaaacaacaacaaaacccgcggacctttgttccaacacacagggaggttgaggaacttgcctgtggtaacacaggcactggggtttgagcgatgatctgcatcaacctccagggcatacaaaatccccatcatggctgggcacggaggctcacgcctgtaatcccagcactttgggaggctgaggccggtggatcacctgaggtcaggagttcaagaccaggctgaccaatatggtgaaaccctgtctccactaaaaatacaaaaattaggccaggcgcagtggctcacacctgtaatcccagcactttgggaggccgaggcgggcggatcacaaggtcaggagatcaagaccatcctggctaacacggtgaaacctcgtctctactaaaaaatacaaaaaattagccgggcacggtggcaggcacctgtaatcccagctacttgggaggctgaggcaggagaatggcgtgaacccaggaggcagagtttgcagtgaaccgagatcgcgccactgcactctggcctgggcaaaagagcgagactccacctcaaaaaaaaaaaaaaatacaaaaggtagctgggtgtggtggcaggcacctgtaatcccagctacttgggaggctgaggcagcagaatcacttgaacccggcgggtggaggtttccgtgagctgagatcacgccactgcactccagcctgggcgacagagcaaacaagactccacttcaaaaaaaacaaaaaatccccatcattctgacaggggatgccatgccattgccacctttacagacagggaaactgagtttccaccagttgaagccccttgtcccctatgtcacggccagggagagtaggggtgggaatgtgaacccaggcgggcttctctggagcggagggccttgaagaacacaaatggacatgttcattccctacgcctgtcctcagcaggaatgaagacaccctggtctctggctctctgagaataaacttttgacaccaaagggacttggacaacagttaggaagatgtcctggagcaagtggaccccgtgggttgggggaacttcttggactcacagaggactgagggttcttgcacccccagtggaggtattcatatctgggtggtctttcccatagggtcgactcttattattgttatttaatgtagagacagggtcttgccatattgcccaggctggtctcaaactcctgggcttaagttctctacctgcctcggcctcccaaagctctggaattccaggcatgagccaccatacccgtccctttgctgtcttgagccttagtttacccatttctcgtggggcttttgtggcaattcaatgagattctgcttttacagcccttaacttggagcctggtgccctgtcattgctcagtaaatacaatgatcagggtgtgggctctcgcttataatcccagcactttgggaggccaaggcgggtggatcacttgaggtcaggagttcgagaccagcctgggcaacatggtgagaccccccccccccatctctacaaaaaatacaaaaattagacaggtgcagtggcgcacacctgtagtcccagctactcaagaggctgaggtgggaggatcacctgagcctggggaggtcaaggctgcagtgagtggtgatcgtgccactgcactccagcctgagtgacagagtgagaccccatctcaaaaacaaaaacccggtcgggtgcggtggctcatgcctgtaatcccagcactttgggaggcaaaggcagatggatcatttgaggtcaggagtttgagaccagcctggccaacatggagaaaccccatgtctactaaaaatccaaaaattagccagccatggtggtaaacacctgtaatcccagctactcgggaggctgaggcaggagagtcgcttgaaccagggaggctgaggttgcagtgaactgagatcgcgccactgcactccagtctgggtgatagaatgagactccgtctcaaaaaaaaaaaaaccccacaaaataaatacagttaccatcacctcctcttccaggaagccctcctggctacctaggcatctcctctgactcctacagctgcctgggtgtccccattgtagcactctgggtggtaattgacagcctctgtgagagggtggatgggtatgtgtggggccccctctgtgtcttctgtgcccagcacagtgccagggacacagtagggaagcaataaactgctgggaggagaggtgagtgctgtgggtccactcctgaggccagccaggggctcagcaaggcaccaatgcctcctcccaggagtgaaagatgctggaatcaccaggctcctcctgcagtctggggtccccacctaaggaggcccctcaccccgtggctgtcccagtcattcaggaagtgtccactgtgggctgagccctggactggggacacagcaaggatcaggcagctgggagtacagcctggaggtccccccttgggatgagggctgcacaggcagttaaagggtccaaggatcatcccaggatatggctgagaggctgcaagaggctccatcccctagaggccccctccgccctcgcctgggtgctcccagccttactcaaaggagcaggtcggcccggtgcgttgtctcacacctgcaatcccagtgctttgggaggccgaggcaggcggatcacttgagcacaggagttccagaccagcctgggcaacatagcaagattctatctctacaaaagtaaaaataaatcttataaagtagctgtggactgggcacagtggctcacacctgtaatcccagcactttgggagaccaaggtgggcagatcacctgaagtcaggagtttgagaccagcctggccaacaaggtgaaaccccatctctactaaaaatacaaaaattagccaggcatggtggtacacatctgtaatcccagctactcaggaggctgaggcaggagaatcccttgaaactgggaagcagaagttgcagtgagctgagatcgtgccactgtactccagcctgggtgacagagtgagaccctgtatctaaaaaaataaaataaaaatgaaaagatgaggatcttggcctccattcttgcccttccactccattccaactgctgagcctctcacaccctctgtggctccctttcgcctacaggaaataggatttctgtactgggcatttgaaccccattcccttgtttctgctgacccccagcagtctcaatatcccctacttcctcttcccagaaccaccctccccaaagcccttatcgatgcttggaggattcctatgcatccctcaaaatccaaggtttgggaaagatgctgcagtggtctcaagacatcctcagtgtgatgacagcctggggtgggggtaagggggcaaagtacagcaccagaaatcccaactgagtccccccacacgtcttccaccttcccaccctctctttcgggttctggctccctgcctccaggcaatcaccagtttttaccaggagtgcctcagacctgcccggacatgtccaagtcccctagaagcagggaggggtgggtgaggctgtcacctctcccttccctgtatggtgctgataagggcgtggggaggcagagacaggcagagatagacatgatgagagacaggcagaaatggagggagagccagggagagagagacacaaagagaaaaagtggaaattctccagatattttgtttagggtgaggacacggagacacagagagggacttagccagctgaggatgacgatttgggatgttaggtcacccaggtgctgtgctgtgtaactcaggcacagagctgccctgttccgagcctcagtttacccctgtgactcagagcagatctccatacccccatcacagggctgtgtatccgagctcagccagagcctggcatgcagtaggtgcttcataaatacacactgtggacagtagaattatgatgggagcgagcgtgtgaactgggttgctaatgtggagcgtgaagagggaggcccagggttactcggccaatgggttccgggcagcaagcacgtgggggaagcctcagctgaccacttcctggccagtttatgcaggaactcgcacagccggtccctgaggctgagcccaccacttccgccccccatggtcccagccctgctgactcatactcagctgccacggtccgctttccctgctgagcacgggggtgggggcgggggggaagagggggagggaagggcacctgaccgaggccagaggcccagaaaggacagaaggtcatggctggggagaagcaggcaggagaaccgagtcttggccttaactggctggcaacgtaaaacctgccctccacaaggacaagatgaaaacttggggatttggaggggacaacaaattagactcaatcacaatttcaaacttttggatgtcaatatatccatcaagaaattgaaaagaggcctggcatggtggccgatgcctgtcatcccagcactttgggagaccaacgtcggaggatcacttgaggtcaggagttccagaccagcctgggcaacgtggtgagacccggtctctacaaaaaaatttaaaaattagctggacaggggccaggcgcagtggcttacgcctgcaatcccatcactttgggaggccgaggcctggatgacagtgagagactctgtctaaaaaaaaaaggacaggtgcggtgcttcgcgcctgtaatcccaacactttgggaggccaaggcagatggatcacctgaggtcaggagttcgaaaccagcctggccaacatggtgaaaccccatctctactaaaaatacaaaaattagccaggtgtggtggcgcatgcctgtcgtcccagctacttgggaggctgaggcaggagaatcacttgaacccgggaggcagaggttgcagtgagccgagatcgtgccattgcactccaggctaggtgacagacagaaactcttgtctcaaaaaaaaaaaaaaaaaaaaacccaccagagataaaaatgggcagcagatgacattgtttacataatactgaccacaaacttgatgtcctaaaagaacagggacttctctcagagttctggaagccagaagtccgaaatcaaggtgtcacagcaggactggttccttctggaggctgtcaggactcagaatgtgatactccaaagtatggctccttggcaaaaactttgtggtttttgtttttagagacagggtcttgctctgtcacccaggctggggtgcagtggtacaatgatagctcactgcagcctctacctcctgggctcaagcaatcctcccacctcagcctcccaagtagctgggactacaggcatgcgccaccacacctggctaattacttttatttttgtagagatgaggtctcgccgtgttgcccaggctggtgtcaaacttcttcttcttcattttttgtttttgagatggaatctcgctctgttgcccaggctggagtgcaatggtgtgatcttggctcacagcaacttccgccttctgggttcaagtgattctcctgcctcagcctcccgagtagctggaattacaggcatgtaccaccgtgcctggctaattttgtgtttttagtagagacggggtttctccatgttggtcaggctggtcttgagctcctgacctcaggggatccacctgcctcagcctcccaaagtgctaggattacaggcgtgagccaccgcgcccagcgaagacagttattttaaagtatttgtctagtgagtctgatgtgtgggcttccttagggatggtttctgtctgttaattttgttccttaaaatgcgccacactttgctgtttctctgtatgcctagtgatgtttttgttgttgaaaagcgagcatttgaatattctaaattatggtaactccagaaatcagattctccaccttcctgagagttttgtgatttttgtttctgtttttaattatggaaggcagtagccatctctttgtttagatagttttccaaaccgcttttttttttttttttgcaaagactgtattccggccgggcccggtggctcacgcctgtaatcccagcactttgggagtccgaggcaggtggatcacgaggtccggagatcgagaccatcctggctaaaacggcaaaacccccctctctactaaaaatacaaaaaattaggtgggcatggtggcgggcacctgtagtcccagctactcgggaggctgaggcaggagaatggcgtgaacccgggaggcggagcttgcagtgagctgagatcgtgccacggcactccagcctgggcgacagagcgagaccctgtctcaaaaaaaaaataaaataaataaaataaataaataaataaataaacctgttccccaaatatatatatgaaattaaaacatgcgtggtcatgatcaagttctaattacagacaaagacttccttgagattggggagaacctgccttggactacggggaccacttcaactctcttgggaatgatttttctttaggtgggtgctggataggggtgtttgtgattttattattaatacttttgtgtgtgcctgaaagatttcacaatgacaaataaaactgagaggaaaaggtttggcagttccccattaagttcaatacagggttactctgtgacccagtaattccactcctcagtagagagccaagtgaaatgaaaacaggtgttcaaacaaaaacgtgtacacccacttttacagcagcattcttcatcaaggcgaaactacagtacaaatattgtaagattccatttctgtgaaatgttccgaataggtaaatctataaaggcagaaattaggccaggtgcagaggctcatgcctgtaatcccagcactttgggaagccgaggtgacaggatcgctggaggttaggatttgaagaccagcctgggcaacatagcgagatcccatctttacaaatttttttaaaaattagcaaggcactggctgggtgaagtggctcacgcctgtaatcccagcactttgggaggccgaggcgggtggatcacctgaggtccggagttcgagatcagcctgggcaacacggtgaaacccccgtctctactaaaaattcaaaaattagctgggcatggtggtgcatgcctgtaatcccagctactcgggaggctaaggcaggagaatcgtttgaacccaggaggtggagactgcagtgagtcgagatggcgccattgcactccagcctgggcaacaagagtaaatctccatctcacaaaaaaaaaaaaaaaaaaaaagcaaggcacagtggcatcaggctggggtgggaagatcacttgagcccagccattcgagaccaacctgtgcaacacaggaaaaccccattctacaaaatagtaaaaaattatcagggcatggtggcacatgcctatagtcccagctactcgggagagtgatgggggaggatcacttgagcccaggaggtcgaggctgcggtgacctatgattgtgccactgcactccagcctgggctacacagccagaccctgtctaaaaagaaacaaaacaggcaggacgcggtggctcacacctgtaatcccagcactttgggaggccgaggtgggcggatcacctgacatcaggagttcgagaccagcctgtccaacatcgtgaaatccccctctctactaaaatacaaacattagccgggcatggtagtgggtgcctgtaatcctacctactcgggaggctgaggcaggaaaattgcttgaacctgggagatggaggttgcaatgagccgagatcgcgccactgcacgacagcctaggcgacagagcaagactccatctcaaaaaaaaaagaaaaagaaaaaaagaagaaactctcattgatggagtgttcattgatggagcactttttgggagtgggttgacatgctcacaggtgtttttaacctcacctcgtctctgaagaggtgcagataaaagtcacctggtgaggaaaatgcctttttaaaaacaatttttagagggccagcacggtgactcacgactgtaatctgagcaatttgggaggccgaggtgggcggatcacttgaggtcaggagttcaaaaccagtctggccaacatggtgaaatcctgtctctactaaaaatacaaaaattagttgggcatggtggcacatgcctgtaatcccagctactcgggaagctgaggcaggagaatcactttaacccaggaggtggaagttgcagtgagccaagatcgcgccagtgcactccagcctgggcaacagagcgagactctgtctcaaaagaaaaaaaaaagagatggggtcttggggtctcactgtgttgcccaggctggtctccaactcctggcctcaagcaatcctcctgctttggcctcccaaagtgctaggattacatgcctgagccactgtgttcagccagggtgtcccttttctgagactgcattctttccaccttgcccaagtattgcaggagaaccacaggccccatgctgtgctggcgaaaatctcatctcatgctggcctgttagggtggccatatcctctcatttcagaggctctgagggagatggaacaggctcagcggctggctgcttggggctctaaccccagccctgctgtcttctggctgtgtggccgtgacgagcccacctctctggcctcagtttgtcatctgtgaaatggacataatctatccaccacatcaggctgtataaagattaggccaggtgtggtgcctcacacctgtaatcccagcgctttgggaggctgaggcaggcagatcacctaaggtcaggagttcgagaccaacctggccaaaatggtgaaaccctgtctctaataaaaatacaaaaattagctgggcatggtggcatgtacctgtaatcccagctacccaggaggctgaggcaggagaatcgctggaacccgggaggcagaggctgcagtgagccaagattgcaccactgcactccagcctgagtgacagagcgaaactccgtctcagagaaaaaaaaaaaaaaaaaagatatgtccaagtcctaacgctcagtatctgtgaccttatttggaaagaaggtctttgcaaatgtaattaaactaaagatcttgtactgagatcattctgaattaagaatggacctgtggctgggcacagtggctcacacctgtaatcccagcactctgggaggctgaggtgggcagatcacctgagatcaggagttcaaaaccagcctggccaacatggcgaaaccccgtctctactaaaaatacaaaaaaaaattagctgggcgttgtggtgcacacctgtaattccagctactcgggaggctgaggcaggagaatcacttgaacctgggaggctgcagtgagccgagattgcgccactgcattccagcctaggcaacaagagtgaaactctgtctcgaaaataaaaacataaaaagagtggacccatggccaggcacagtggctcatgcctataatcccaacactttgggaggccaagatggaaggatcgtttgaactcagccgtttgagaccagcctgggcaacatagtgagacccctgtgtctaaatacaaacacaaacagaaaacaaaaagaacccgggctggctgcggaaccccctagatggcacaggcacatcctggctttcgaggacagtcacgagcatgagacagcatttcttcttgtcctcggggcctgcaggaagtttttaagtaatctgcttttgtgcctcttccaaatctcctcctatgaccctgtttaccttacatcacaagaaacaatcaataaaagtggtttgtgttcgtgagtgccgtgtgtttgacaaaggcgttgataactgagagctggtagtggaggggggagattttgggagattggggccctgccaggtggacggactggcctgacctccggcccctgtgctctgtttacttccatcccagctccacctctggggacccatggaagctgtcggtgaggaacacaggatccgacctgctgagctcatctctggccacctgcctgcatccgccccatctctcctctcagcttggccatgaggcgggctatgaggtcattggttaaagatttggggaagcagagccaggcgagtggccagatgtggtggctcatgccatcacaggatcccagcactgtgagaggacaaggaaggaggatgcttgagctcaggagttcgagaccagcctgtacaacatagcaagacccccgtctctacaaaatataaaattagccagttgtggtggcacgcgcctctagtcccagctactcgggaggttgaggtgacaggatcccttgagcccaggaggtcgaggctgcagtgagtgggtaacagagccaaaccctgtctctaaaacaaacaaaaacagaaacaaaaagtacactacttactgtcctgcttctcaccattccagcctggtagtccttttttttttttttgagacagggtcttgctcagttgctcaggctggagtgcagaagcgtaatcacagctcactgcagccttgatctccaaaaagactaccagcttggctgggtgtggggactcatgcctataaccccagcattttgggagccagaggcaagaggattccttgagccaaggagttcgagaccagcctgggcaacacagtgagaccctatctctaaaattttttttttttgagatggaatttagctctcgttgcccaggctagagtgcaatggtgcaatctcagctcaccacaatctccacctcccaggttcaagcaaaattctcctgcctcagcctcccgagtagctgggattacaggcatgcgccaccatgcccggctaattttgtatttttagaagagacggggtttctccatgttggtcaggctggtctcaaactcccaacctcaggtgatctgcctgccttggcctcccaaggtgctggaattacagacatgagccaccgtgcccagcctaaaaaaaatttttttaaaaaatagctgagtgtggtggcacatgcctatagtcccagctacccaggaggctgaggtgggaggattgcttgagcccagcagatcaaggctgtagtgagccaagattgtgccactgcactccagcctgggcaactgagcgagaccctgtctcaaaaaaaaaagaaaaaggaaaaagaaaaagaaaaaaaaaggactaccaggtgttttttttttttttttttttttgagacggagtctcgctctgtcgcccaggctggagtgcagtggcgcaatctcggctcactgcaagctccgcctcccgagttctcgcctttctcccacctcagcctcccgagtagctgagactacaggcacccaccaccatgcctggctaatttttttgtatttttagtagagagggggtttcaccgtgttagccaggatggtcttgatctcctgacctcgtgatccgcctgacctcggccttccaaagtgctgggattacaggcacgagccaccgcgcccagcctggtgtccttatttcttgggaaaggatacagagggtcagagaggcgccccagcttgtgcaggaatgcattcctgagatctggcctggccgtggtcactggagtgtttactctgcttacagggtctggtgtagtgggggatggctgggtaggaacgtgcgggctataaagccagaccccaggtgtcagtgcggttcagaaagcaactagcacagccatgcccaggccaggacccgtgacacagcgatgctctcagatgctgctgatgttacagatgttgttgggggcaccctgagggggcaccctgactctgcaggtgagaaccttctggggttcctaggaccctcggacaagcactctgatccggatgactccaggtcccaggagttgcagaaacgccaccaggaccttcagagcaccagttagacaaggagagccaggaggagctgggccccaacctcatccaaaagcacaggtgagctctgagacctccacccccaggacagcccccacgtctattttctttttctttaaagatgttcttatttgggggccaggcgtggtggctcatgcctgtaatcccagcactttgggaggccgaggcaggcggatcacctgagatcaggagttcgagaccagactggccaacatgacagggtgagaccccatctttacaacaaatacaaaaattacccaggcatggtggcacacgcctgtaatcccagctactagggaggatgaagcaggagaattgcttgaacccgggaggcggagattgtagtgagttgagatcgcacaactgcactccagcctgggcaacagagcgagactccaatccaaaaaaaagaaaaaaatcccctaggacagggctgtggctgagaccctgagggctggaggcttggctggccttgcacagcagcgggtgcatgctggggtggggagaggcctggagaccctgtgactccactgggggccttgctgtgtgaccccctagtgagtccttgtgtctcttacccacgcatgcctgtcacatgcagacacccacacacacccagtatctgccggacagggcagcccttcctctccgcagccaggaagctggacataggcacaagggctgacgcctggggccaggaatcctgcctgagcattaggagaaggtctggaaccccagggggaagggcactcctggggcatcccctgcccctctaccatctggtggctggactctacaccagcctgccctgctctaaaaccccagctcctcaattctgtgccacctcctctctgggcccagacaagagcagattcatccctgccccaaaggaaccaccagtcttgggtcagcagagctgggcacagacacttccagtgccgtggggctgtaactgtgataggtctgttgctccatgcacttggcaagtcaacagctgagaaaacaggttgcaacatggaaagagttttaatccgaccggcgtggtggctcatgcctgtaatcccagcactttgggaggctgaggcgggtggatcatctgaggccagcagttcaagatcagcctggccaaccaggtgaaacctcatctctactaaaaatacaaaaattagccaggcgtgatggtgcgcacctgtaatcccagctacttgggaggctgaggcaggagaatcaattgaacctgggaggcggaggttgcagtgagccaagatcataccactgcactccagcctgggcaacagagcgagagactgtctcggaagaaaaaaaaaaaaaaaaaggctgggggcagtggctcatgcctgtaatccccacactttagaggcagaggccgacggatgacttgaggtcaagagttcgagacctgcctggccaacatggtgaatcaccgtctctactaaaaacacaaaaattagccaggtgtggtggcgcatgactgtaatcccagctactcagtaggctgaggcaggaggcggaggttgcagtgagccgagattgtgccactgcactccaacctgggggacagagagaaactccgtctcaaaaaaaaaaaaaaaaagagatttaatcctagggccacccaatgaggagataggagggaacctcaaatccatttccaggaggaggagtttggggccatataaatgtatatatacaaatatatatatttttttaagatggagtcagccggccgtggtggctcacgcctctaatcccagtactttgggaggccgaggccagcggatcacaaggtcaggagattgagaccatcctagctaacacggtgaaaccccatctctactaaaaatacaaaaaaaaattagccaggcgtggtggggggtgctcatagtcccagctactcaggaggctgaggcaggagaatagcatgaacctgggagctggagcttgcaggttggagtgcaatggcatgatctcagctcactgcaacctccgcctcctgggttcaagcgattctcctgcctcaggctcccgagcagctgggattacaggcatgtgccaccacgaccggttaatttctgaaattttttagtagagacagggtttcatcatgttggtcaggctggtctcgaactcctgacctcaggtgatccgcccgccttggcctcccaaagtgctgggattacaggcgtgagccactgcacctggccaggggctagagttttaatttttaaggattttggagtgggctgaagtgtggaggtcattgcttggtgaaagagtgcaggaggtgaagtcacagacagtaagaaactgtattctcatgcagattccgttcctctgtggggtcttcacactggtgggtgtcattggttaaggatttcaaaaacatcttaagaaattcttctaaaaagtcttatgattctaaggtcggaaatcacatctatagcaaatggtcggtatcaggtgctacaagcaacttgcggtcacaaggaagtgggtcaaagtgcagcctgattagtgcttaattataactaagtttctgtccagaattctttttttttgagacagagttttgctcttgttgatcaggcggaagtgcaatggtgaaaacttggctcactgcaacctccgccctctgggttcaagcgattctcttgcttcagcctctcgagtagctgggattacaggcatgtaatcccaccaccaagcccagctaattttgtatatttagtagagacagggtttctccatgttggtcaggctagtctagaactcttgacgtcagatgatccacgtgcctcggcctcccaaagtgctgggattacaggcgagagccaccgtgcccggcgcagaattcttttttttagagatgaggtattgccatcttgcccagacttgtctcgaactcctgggctcaaacaatccacccacctcggcctcccaaagtgctgagattactgacataagccaccatgcctggcccccagaattatgaatcctgtgaggatggcttcaaggtgagcgctgagccagacaaaaggatggggtttgggagcaccctgcttagactggaaagataatgttggagaagacttcctggaagaggggctttttgcgtagagttttgaagaatgagtaggagttctccagaggaggatgagtaactgcaataacacccagtttatcaagtgcctcctatgtgtctggccctgtgctttacccctcatttgaccacctctccagtgagagtctcagtcctttttttcctggtgaggaaacaggcatggcagagaggcatgacacatcaaggttgcccttcctggctccatctagcccgttctcctctgcttcctttgtttttcaccatctttagcctttgaccccaaccaaaaagagaagagaggaaatcccatgggcatagacagccacctcttaaactcttgtctggaatttttcacatagtaacaatgtctttttttcctccaaaaagactcccaggctggaatggtgtcctcatatcgaggaagaggatactgaggcccagaaatgtgccctagctttactaggagcgcccccacctaaagatcctccccctaaatacacccccagaccccgcccagctgtggtcattggagtgtttactctgcaggcagggggaggagggcgggactgagcaggcggagacggacaaagtccggggactataaaggccggtccggcagcatctggtcagtcccagctcagagccgcaacctgcacagccatgcccgggcaagaactcaggacggtgaatggctctcagatgctcctggtgttgctggtgctctcgtggctgccgcatgggggcgccctgtctctggccgaggcgagccgcgcaagtttcccgggaccctcagagttgcactccgaagactccagattccgagagttgcggaaacgctacgaggacctgctaaccaggctgcgggccaaccagagctgggaagattcgaacaccgacctcgtcccggcccctgcagtccggatactcacgccagaaggtaagtgaaatcttagagatcccctcccaccccccaagcagcccccatatctaatcagggattcctcatcttgaaaagcccagacctacctttgagcctcagttgccccatctgtgccctgggtaggaatatcctggatccccttgggtctgatggggtagccgatgcctgatttgcacccacaacgtgggaggttataacctgtccccaagttgcaaatggggaaactgaggtacagggatgccagggaccctcctgaatgtgcacagcacctgggaaacccggggacggggtcgggcgtgcggtgtgggcatggtccctgacctgggctggggccaggatccaagagaaacaatgggggtgtggtgcatggatagaagtttgtgatgggcagagccagctggagctggttctgaatctgatgaaatcgcttgtcaaggcactgctaaagtcacatgcaacgagcgacttgttaggggaggaggagagtattttccccatctctgtgccctccatggaggctccaggggtgcagggcactggatgaggtctgggctgtggtgggacccaggagggggcaggcagaggggcacactcttagcccgccctaaacccatctgtgccgtgtgactccggcaaacctctcacccttgctaagcctagcaactaggttaaggcaccctcaaaccccagtctccccagtctccctaacacttgtaccagcctgaggggctgtgattcctagaggctcagtagtctggaatgtgatgggtttggcactcttcatttctcgggattacacctgtaatcccagcactttaggaggccaaggtgggagcatcgctttaggccagaacattgcagcctgggcagtatagcgagaatccatctctaccaaaaatgtttaaaaaaaattagccagacatgatggtgtgtgcctgtagtctcagttattcaggaggctgaggcgggaggagcacttgaatccaggagattgaggctgcactgagccatgagtgccccactgcactccagcctgggtaacagcaagaccataataaataaataaataagtgaagcaagtaagtttttgactgccagaagaaaagcagagccatggttggaatctcaggctgcctgaatatcagatatacattaattccttcaagtatttactaagcacctattgtgtgccaggcacagtgtcaaccaagctaagattctaagtagggaatatgaatgatacacaaggaaataaaatagggtgcttcctattttaggcaggctggaaggaagaggaggagccagccatactgagattcaggagattcaaggggagaaatgcccttttttttttttttttttttttttttgagagggagtcttcctctgttgcccaggctggagtgcagtggcacgatcttggctcactgcaacctccaccgccccgattcaagccattcttctgcctcagcctcccgagtagctgggatcacaggcgccagccaccatgcccagctaatttttggtatttttagtagaagcgggcgtttcaccatattggccacatatcggccaggctggtcttgaactcctgacctcaagtgatccacctgcatcggcctcccaaagtgctgggattacaggcgtgagccaccgcgcccgcacggagaaatgctcttggtaggggaaataacttgtgcaaaggcgccgccgccgtggtgagatccagcttggcgtgttaggggaaatgggcaccctcgttcctggaaaacggtaggcctgtgggtgaccagcttccctatctgtcttcccacagtgcggctgggatccggcggccacctgcacctgcgtatctctcgggccgcccttcccgaggggctccccgaggcctcccgccttcaccgggctctgttccggctgtccccgacggcgtcaaggtcgtgggacgtgacacgaccgctgcggcgtcagctcagccttgcaagaccccaggcgcccgcgctgcacctgcgactgtcgccgccgccgtcgcagtcggaccaactgctggcagaatcttcgtccgcacggccccagctggagttgcacttgcggccgcaagccgccagggggcgccgcagagcgcgtgcgcgcaacggggaccactgtccgctcgggcccgggcgttgctgccgtctgcacacggtccgcgcgtcgctggaagacctgggctgggccgattgggtgctgtcgccacgggaggtgcaagtgaccatgtgcatcggcgcgtgcccgagccagttccgggcggcaaacatgcacgcgcagatcaagacgagcctgcaccgcctgaagcccgacacggtgccagcgccctgctgcgtgcccgccagctacaatcccatggtgctcattcaaaagaccgacaccggggtgtcgctccagacctatgatgacttgttagccaaagactgccactgcatatgagcagtcctggtccttccactgtgcacctgcgcggaggacgcgacctcagttgtcctgccctgtggaatgggctcaaggttcctgagacacccgattcctgcccaaacagctgtatttatataagtctgttatttattattaatttattggggtgaccttcttggggactcgggggctggtctgatggaactgtgtatttatttaaaactctggtgataaaaataaagctgtctgaactgttccctgtggtgtccaggataagggaaggtgaccttgagaagatcctcctctccctgacctcagtttctctaggagacctgggagggggtaagtggaaaggctcaaggaatgagtggcaaggtgttctcggagatgccaagccattggaaggtgcttacgacacctgtgggctctaagggcagccttggccattcctgactccctgactctctgtctctatttctctatctccttattgctgtttcttttttctttttattttttttagacggggtctcactctgttgcccaggccgaagtgcagtggcacaatcacagctcactgcagcctcaaccacccgggctcaatcgatcctcccacctcagccacctgagtagctgggactacaagtgcatgccatcatgcccaactaacttttgtattttttgtagaggctgagtttcgccatgttgcccaggctggtgtttctgttttggaaacagctgagaccccatacctttttaagtctcagcttccctccatctttcctcattcctcaaaacttctctctttggggtctgaggcagaggatctgtctctgtctttgtctctatcaccatcctgttgctctccccacttgggagtcacctttccaaacacaggcagctcagagccaagtctatctgcaaccaagtgccttgttttgtggtactgtccccaacctgaggggttagtcccatcacccctcctgtttgtggcacttccatgttagtgacacctcattctttcacatataaagagtagggagaaacaaataagttgtgaagaatattttcatgcacaccacatctcccaggttatatatacttcctgtttaggatgttggaattttgaggtgtgctgagtccagccccctctccacaccaaactgcctgcccatcctgaatctctgagaggaatggcgatgggtgtcttgagggacagagtacccacttccagcagtgaggtgtatctgctgggaatgccatcacccacaggccaacctgaatgactgcaggttccccttaacgtattcagtgagtgcccactttatgccaggccccggacacagctgtaaaaagacacacaaggaccaccccactttgcggagcctggttgagtgaaggggacaaatgagtaaatcctaagaaagtagttgattgcagtaagatttgtgctggggattcaacccatcagttcattagtgaacggaggcagaggtgatctagatagttggatggggaggcctccctggggagggaggtcacatttgagctgagacctggaggaagaaaaggagtcggggagggggtagttgagggtggacattgcaagtaaatgcaaacagcaagtgcaaaggccctgagatgggagcaggctcacttcagtcacagcaaagctgttgaaaatgggcacctaggaggcttcaaaattaaactcaataccaaaaggcagcagatggtgtcactgagtctttccccaaacaacagctgttgcctttgcaaggtatagggctgggcctgtgccttctctgtgcttctccaggctcttgcacaagttggtccacccagccagcatgccctttcctctccaattctcaaactcctatgcatccttcaaaacccactgcagattcccctcttacatgcagccttattcaaactcattcaattgtctccatgtggggactgtgctcccattcttccctttggcccaggcttgatctcccaggactgagggtacttgtctctagttctatctcccccaggttggaggattgggctgggaccagctgataggaaacccagttgaggcatgagcctgaaaaaactcttgaaatacagacatctgtgagtcattaactctgcctgagaagaaaccagggacagcttctcaaaggaggtggcattgcaccagggtcttgaaagattttctcagaatattagagctaaaggaatatatacatttttttattttggggttggtgtgggctgctctggaggccaagcctggagatcagggacctgggaaggggccctgagaggggcagaagggaggaatgtgcctgggcgcagtggccacgcctgtaatcccagcacttcaggaggccgaggcgggcagatcgcttgaggtcaggagttcgagaccagcctggccaacatggcgaaaccccatctctattataaatacaaaaattagctcggcatggtggcgggtgctgtaatcccagctactcaggaggctgaggcaggagaatcacttgaacccaggaggcggaggttgcagtgagctgagaccgcagcattgcactccagcctgggtgacagagtgacactcagtttcaaaaacaaacaaacaaacaacaacaacaaaaaaaaacagggatgggaggtggggagcaatttgggagtctcagatggagacttggtcttagaactcagaaatccccaccttgaggaacccacgcaccctgagccagcagcctcatcagcctcgaagcatttattgagcactgcctgtacatccacaggagggtgatgacaggattggcacagtgaccgtcctgtccccttgttgggggtctctcctcttccccctctaggagctgagggagctgaggagcggcatgagggacagggagggggcggcagagcttcctggggcctcaaggacaatcctttcctgtacccattcttcagatggggaaactgaggccatggaggcgttaggacgccctgagtcacccagcagggactgaaggggttctgggtggaggttaggacatcttaggctcagtgcccggggatcacgtactcctcttcatccattggggcctggcccagtgactgcaggttacagtagacaggctgggaagccaggtcgatgtccttgtagttgatgtaaaagtcattgtcctctgaagggtgagccctggggggacagacagaccaggggtaagtgtgggagggggaggactcaggggacaggcacatgagctttgagaaagtccagagtgggccaggtgctctgactcacgcctgtaatccagcactttgggaggctgaggtgggtggatcacctgagatcatgagttcaagaccagcctggacaacatgatgaaacctcgtctctactaaaaatacaaaaattatccaggcatggtggcacaggcctgtagtcccagctactcgggagtctgaggcaggagaatcacttgaacccaggaggtagaggttgtagtgagccgagatcgtgccattgcacttcagcctgggagacagagcaagactctatctcagaaggaaaaaaaaaaagaaagcttcagagtggctcagtccaccccgaatatttacatatggggaaactggcacgggctagcgttctgactcctagccaaccccacctctctctgaggaggctgcgggagggcagtgatttagggaaggttctgtgggtgtaacgctgcggtctgaggaccctgaaccctttttccttccttaaaaatgagatagcggccaggcgcggtgactcatgcctgtaatcccagcactttgggaggccaaggcagaaggtctgcttgaggccaggagtttgagaccatcctgagcaacagggtgagaccccatctctacaaaaaattaaaaaattattcaggcgtggtgacgtgtgcctggagtcccatctcctcgggaggctgaggtgggaggaccgcttgagcccaggaggtcgagcctacagtgagccgttatcacaccactgcactgcagcctggatgacagagggagaccccgtctcaaaaaaaacagaaattgaggtagctgttcattattacattaaaatctaaatttttgtttcctcttgaaaaatcggaagctctggccacgtcagtcacatgcacacaagtggctgcacccacactctgtgctccttccgatgggaaatgttttcaccactgaagcaactgactttgtggccctcatatataaaagcaagtctctgagcctcagtttctgcatctatagaattggtcaaggagcaggtagctacttaggaatatttgttatggtcagcaagacctccagagaattttcctgcctcctgaacattctaattccaacccagctcctcttgtaaaaagggccactgggccaggtgcggtggctcacgcctataatcccagcactttgagaggccaaggtgggcagatcacctgaggtcaggagttcaagaccagcctggccaacatggcaaaaccccgtctctactaaaattagccgggtgtgatggtgggcgcctgtaatcccagctactcgggaggctgaggcaggaggcaggagaatcacttgaacccgggaggtgaaggttgcagtgagccgagatcatgccattgcactctagcctgggcgacagagcgggaaaaaaaaaaaggcaaaagggctactttgtgttaacagcatctatcagtcaattatactctagtacgaattgcccaccaacccctaagtggttgtagggggacgaacaggtctgggacgcagggtttgtgtcctgccttttttgactggctatgtgaccttggacaagtcatttccctgcctcccagagcctccatgtctgtaactgtaagatgcagggtggaaatgacacagtcaattctaaacacagtgtttctggaggccagtacataaaggaggctgatccggaagcctcggggacagggaggccaagatgaacatcagagcacaagctgcttttgcgagtccagtgtcttcaacaccctgcctcagaccatttctgcttttgagccatgttgacatctgctttgcatattttctcctttctcaccaacagccttccgatagcctccccacctcctggcacggactctgctgcccaaacacagccatggccgcggccccttcctgcttggccctccctgttcccctcaggcctcagctttcaagtcatcccttctcaaaaaccattcacagcaaattctctgttctttcccacctctgggtctctgcccctgagggtcccaccccttgaaattccctccattcccttttccaacctagaaaagcttttcttttctttttttctttctttctttctttttttttttttttgagacggagtctcgctctgtcgcccaggctggggtgcagtggtgcgatctgggctcactgcaacctccacctcctgggttcaagtgattcttcttgcctcagcctcccaagtagctgggattacaggcacccacgaccatgcccggctaatttttgtatttttagtagagacagggtttcaccatattggccaggctggtctcgaactcctgacctcgtgatcctcctgccttggcctcccaaagtgttgggattacaggcatgagccaccgtgcccggcctaatttttgtattttttagtagaaacagggttccaccatgttggtcaggctggtcttgaggtcctgaccacaggtgatctgacctcgccttggcctcgaaaagtgctgggattataggcatgagccaccgcaccccacaccaacctagaaaagttcaactcatttgtctaagcccagcaaaatcatccagaagccggtggcggtggctcacacccataatgccagcactttgggaggctaagacatgaggatcacttgaggccaagagtttgagaccagcctgagaaatatagcaagacccccgtctctatgaaaaatacaaaaattagttgggtgcggcggcatgtgcctgtggtcccaactactctggagactgaggcaggaggatcacttgaggccaggagcttgaggctgcagtgatctgtgatggtgccactgcactccagccagggcgacagaatgacactgtctcaaaaaaaaatgtcggctgggcgcggtggctcacacctgtaatcccagcacttaaggaggctgaggtgggcggatcacgaggtcaggagatcgagaccatcctggctaacacggtgaaaccccgtctctactaaaaatacaaaaaattagcctggcgtggtggcgggcgcctgtagtcccagctactcgggaggctgaggcaggagaatggcatgaacccgggaggcggagctggcagtgagccgagatcgtgtcactacactctagcctggatgacagggccagactccatctcaaaaaaaaaaaaaaaaaaatcatctagtggtgatgggactttgtagggcacctctttagtatctcatgtgtgtcatggggaaatggggggctgtccccactctatggagacagaaatggaggttcagagacagccttgggtcacatgggacctgggcctatgctgctgaccgccaccgcggagccccaactccgctcaagcagttgcctcctgtctccccatccttggccgccagaaactgggtttacaggtcataagggggggaagtttgtcccatatatgggaactcacttaattcttaccccaacacactatgatgggggctgtaattctccctcattttactttattttattgattttatttttgagatggagtctcactctgtcacccaggctggagtgcaatggcatgaacttggctcactgcaacctctgactcccaggttcaagagattctcttgcctcagcctcctcagtagctggaaccacaggcgcccgccaccacacctggctaatttttgtatttttagtacagactgggtttcaccgtgttggccaggctggtctcaaactcctgacttcaagtgatccgcctgccttggcctcccaaagtgctaggattacaggtgtgagccaccatgtccagtcctctccccattttataggtgaggagactgaggctcagagaagtaaagctactcacctaagatcccacagccttcaagcggcagagctgggatttgaacctcggccatctgggtgtggagccttattattcaccactttggcaggtgtctcagtggcttacttacccttgttcatcccactggtgctcggctgctggctggcccacaaacatgttctcatagtcgggagtggaggggcaggatggcacggccacttggggcttgggggcgctccggctgccgtaccgtggctgcaagcctaaaccgggcttgggcccatcctgagcagcccagggtttgttcagctcccggcttctggccactcggcatcgccagagtctccaggccagcacagggccagcgatggcaagtccaagaagcaggcacccgctgaccaccactgccccgatagttgcagaggccaggccaggggcgcagctgacctccaggaaggcagagaggttgtgctgggagctggttgtgtcccagcagagcagaggcttctggccagagcagttgtctcggcggatgtcgtgccaggactccagggcacagttgcagtcggcctgcaggtcaaggtcacagcgggcggccagcgccccatccacacgagacaaggggttgcgtagcacgttcaggacctcaagcttctgcaggtgggcaaagaaggtcactggaagctctcgcaggccgttcccagacaggtcaaggagaatcacgttgctggcccgcagagactggttgtgaggcaggctcaggctgaggccactgaaattcaggcacgtggcactgaactccgcgttccagtccacatccgcggaggacacggtgcacgacggttctaggctgtctgactcccgcagcagcagcggcaacagcagcgtccatgccagggtgccccccattcaagcaacctacgtagagacaccggaatcctagccctgacctcagccctgtggtcgccctcgcctccaccgccagtgtttattattatagctcagaccagctcaagccgcttctgaaatggtaaaacgcagccccagtctggtcgcctcctttggctggtgggctgcctcagtctccccttctggggaatgggtagataaccccagtgcttagcgggcttggaaggcgaggaggagatccgggccagttaaccccttcttctatgtcctgaacatttggggcgccctcgttggccaggacgggaccctatgcaaataagcggttgccttggaaacggccccgccccctgatcacgctcccggtatctcccagaacggcgggtcgctgggaagtcctgggatagggtggagtgggggctgctgaaagggtcctcccaggtctggtttgcagtccctgcacaggtgcaagttctagagcctcagtcctaccttttgggtcccactgccacgcttttgcctctgcgatgctggaaaagcgacggcgcccagaggctgcgtcctggcccacctggacacgggggccgcagcggccacggccagcaccgtccgcagcgctgctggggtcgctggcgttcctctggctctgcacccagcgactcagggggaagaggaactggtgtctgggtggagtgcagaggggaagaatgaagacagagatccgcccccttgcagggcctcaaggttctcaccagaggtggatggagggcaagagggaggggtggaccagagtcccgcttccctcttgctagaacccagtgacttcatgtcctctattagcaccccaaccgactgccacctcatcaactcgcttcttgatctcagcttggctggttcccagctcatgcagtcatttattcattcaacaagcatcacccacgctgggcccccaagaggcctcagccctgaccaggtcctcaaggagctatcttaagagaggacagagctggacatagacactcctagtcccatgcagttaaggaaggtccagagggaaagacagggtcctggaaggcttcctggaggaggaggcattacagttggggcttcaacgcatgagtaggagttcactaagattccccaaacctatcattggctctccaagctcctccaagcctctcccactgagttcttgcacagtggcacctctatgctggaggggacagtgaggagggctcccagcagcttgggaaaatgtagctggctgggatagcatggttaggagtggagaggatagaaggaattggtggtgggggaagaggtccatgtggagccaaggcaggtgcgtgggcagaggggcactggctcaagaagtccctctggagtgagcctggtgtctggggtgggcaacttggggaggaggctgaggtcccagaagcagatgggggcctgaggcagactggaggggtagtagtgacaaaaatgatactgaggaggggtgggctgggagaaggcctcacctgaacctggtgtcaggtggaccaggtacaacctatgccagcccgactcactgtgccaccttaactgcgtgtgacaccatgtccacagctgtcaaatgcacagaggcttctccgggatctgggaggctgggagtccactcccccacgttttcccctcttttcggcctctgtccttcacatcgccaaactccaagaaatggtcaaaggctttgaacggagaccttgaagaaaaagcgggaaactgcttttcaacatgtccagagatgctcattcttgccaggtgcagtggcttacacctgtaatcccaacactttgggaggctgaagtgagcagatcgcttgagcccaggagttcgagaccagcctggccatcatggtgaaaccccgtctctactttaaaaaatacaaaaattagccaggtgtggtggtatgtgcctgtagtcccagctactcaggaggctgaggcaggagaattgtttgaacccaggaggtggaggctgcagtgagccaagatcactccactgcattccagcctgggcaacagagtgagacctgtctcaaaaaaaaaaaaaagttcacacttaataagaaaactgcaaatcacaaactgtttgtcttcaccaatcaaattggcaaaaatccaacaatgcaatgacattctgtgccagccaggctgtggggtgcgtccatggtgtagcactggtggagggcaccctggcacaggccaccggaatgataaactcatgtgcctgctgacacagcaagtccacttctgggaatccctgcctgaatatttgcatgtttacagtgtgaactgactaacgaataaaaaaatgtggctcagcctggacgtggtggctcatgcctgtaatcccagcactttgggggaccaaggtgggcggatcacgaggtcaggagtaccagaccagcctggccaacatggtgaaaccccgtctccactaaaaatacaaaaattagctgggcatggtggcacgtgcctgtaatcccagctactagggaggctgaggcaggagaatcgcttgaacccaggaggcagaggttgcagtgagctgagatcatgccactgcactccagtttgggcgttagagcgagactccatctcaataataataataataataataataataataatttaaaaattagctgggcatggtggcttcagcctgtagtcccagctacttcagaggctgaggtgggaggatcccttgagcccagaaggttgtgactgcagtgagccgtgattgtgccactccactccagcctatgcagcagagcaagaccctatctctaaaaaataatttaaaataaatggctgggccggccgcggtggctcatgcctgtaatcccagcactttgggaggctgaggtgggcggatcacctgaggtccagagtttgagactagcctgaccaacgtggagaaactccatctctactaaatacacaaaattagccgggtgtggtggcgcatgcctgtaatcccagctacttgggaggctgaggcaggagaatcacttgagcctgggaggtagagtttgcagttgagccgagatcacggcactgcactccagcctgggcaacaagagcaaaactccatctcaaaataataataataaataaataaattggctaaaatgttcaattttatgttgtgtgtatgttgcaggtttgtttttttgagaaggcaaagtcaggcgtggtggctcacacctgtaatcccagcactttgggaggctgaggtgggcggatcacaaggtcaggagactgagacaatcctggccaacgctgtgaaaccctgtctctaccaaaaatacaaaaaattagctgggcgtggtggcatgtacctgtaatcccagctactcgggaggctgaggcaggaaaatcacttgaaccagggagttggaggttgcagtaagcctagatcgcgccacagcactccagcctggtgacagagcgagacttcatataaaaaaaaaaaagagagagagagagaaggcaaaaagatgctccaggctcaaagtgattcattgcagcattgtttgttacatgaaaaaaaataaaatgggccgggcacagtgagtcatgcctgtaatcccagcactttgggaggtcaagataggaggatcgcttgagcccaggagttcaagactagcctgggcaatatggtgaaaccccatgtctaccaaaaaaaaaaatttttatatatatatatagatagatatacacacacacaaaaattagctgggagtggtggcacatccttacagttccagctactcgggaacctaaggcaggaggatcgcttgagtctggaaggcagaggttgaagtgagctgaaatcgtgccactgcactccagcctggggtgacagagtgcagagtgatcctctgcctcaagaagaaggaaaaaaaaaaaaaggaaataacttaaaggattggttacattagtaacagttcagttcatccatcctagcatgccacaaagttctgaaaatgaaattataaatctctatgaacctataaggaaagactcattcatttcctctgtaagcctttatgaagttcctgttgtataccaggtactatgaaccacagacacagcagtgaataaaacagacaaaaatcccagccccccctccccccacctctcactgtagttggggaaacagacaacaggcagaatccatcgggaaaatatatcaagtgcaggtggtgggaatgctgcaaagaaaaataagggcaggaaatgagatgggaaacttttatttatttatttatttatttatttatttatttatttatttgaaacggagttttgctcttgttgcccaggctggagtgcagtgatgcgatctcggctcactgcaacctccacctcccgggttcaagcgattctcctgcctcagcctcccaagtagctgggattacaggcgcatgggaccatgcccagttaactttttgtatttttagtagagacggggtttcaccatgttggccaggctggtcccgaattcctgacctcaggtgatccaccctcctcagcctcccagagtgttgggattacaggcgtgagccactgagcctggccgcagaagcaacttttcaatgggatgatcaaggaaccccttagggagtaaggaggaagggatgtggggaacagcatccaggagtgggaacagcatgtgcaaaggccctgtggtgggagcagccctgggtagagagcagatgtctccaaatgtttgttcaggctgctataacaaatatgccgtaaactggggtagcttatgaacaacagttccggaagctgggaagtccaagatcaaggcaccagcagattcacttcctagtttgcagatgaccgtcttctcactgtgtcctcagtagacagcagagggagcaggggagctcttggggcctcttttataaggagcagagggatggaggagcccagccagcagtgagcctcatgcagctgcacgtcctccacgcccagttctgaggcctcttagaaaaaaaggaaataaagaaatgaggaagtgccagacccgaggctgcaggtggtgggggacaggcaggcctggggtctgggatagtgagttttggaggtgggtctgggggagccgggggccttggagtctgaggtctgtggggtcctgagatttggggactctgaggtctggggatccaggggtctgagagtcctggaatctaagggtcctgaggtctgggggtcctaaagtctgaggatccggaggtttgggggtcctgggatctaggggtcttgggatatgggggtttggtgggggggtataggggtctggggatccagatgtctgagagtcttggggtctgggggtccaggggtctggtggttctgaagtctggggatccagaggtctgggagtcttgggatctgggggtcctgcagtctgggggccctggagtttggtagtcctggggtctgggatgtagggaaaagaaaaagcgatcagactgttactgtgtctatgtagaaaaggaagacataaaaaacttcattttgacccataccctgaacaattgctttgccctgagatgctgttaatctgtaactttagccccaacctcgagctcacagaaatatgtgttgtatggaatcaaggtttaagggatctagggctgtgcaggatgtgctttgctaataaaatgtttgcaggcagtgtgcttggtaaaagtcatcgccattctccattctcgagtaaccaggggcacaatgcactgcagaaagccgcagggacctctgctctggaaagtcaggtactgtccaagatttctccccatgggatagtctgaaacatggcctcgtgggatgggaaagatctgatcgtccccccagcccgacacccgtgaagggtctgtgctgaggaggattagtaaaagaggaaggcctcttgcagttgagctaagaggaaggcctctgtctcctgcctgcccctgggaactgaatgtctcggtataaaacccgattgtacatttgttcaattctgagataggagaaaaaccgccctatggcgggaggcgagacgtattggcagcaatgctgctctgttactctttactcggctgagatgtttgggtggagagaagtataaatctggcctacgtgcacatccaggcacagtacctgctcttgaacttgtgacacggattcctttgctcacatgttttcttgctgacctcctccccactatcaccctgctctcttgatgcattcctcttgctgagatagtgaaaatagtaatcaataaatactgagggaactcagagactggtgccagtgcaggtccttggtatgctgagcgccggtcccctgggcccactgttctttctctatactctgtctctgtgtcttatttcttttctcagtctctcattccacctgatgagatatcccacaggtgtggaggggcaggccaccccttcatgcaggtcttaggatgtgagggttctgaggtctgtgggttctggggtatggggatccagaggtctgggagtcttggggtttgggagtcctggggcctgaggatcctggggtctggggatcctggggactgagggtcctgggctctggggatccagaggtctgggagtcttggggtttgggagtcctggggcctgagggtcctggggtctggggatccagaagtctgggggtcctggggtcctgaggtctgggggtcttggggtctgggggtgctggggtctagggatccagaggtctgggagtcttggggtctggggcccctggggtctgggccttcctgacacagccccagctggctactcccaggtttctgggaaaggggacagctcaaggctccactggcctcatccctggctgaagggagcctggaactttcagaggccacctccctggggtccctctgctgccccctgatgtacctgaagccgtcccaggcttgagtcccaggcagggccagccagtctgcacaaaaacctccaggcagccgccagagatggccccagacagagagacaccagcccgccccccagctatactcagagatgccaagagaccctcagaaacacttgggggccaccataggcatgcagagacacctagggacactcagaaacgcccagggatgcccagaaaacctcagagacccccaagatcctcagagacatttagagaccttcagagactcccaaagaccctcagagaccctcagagaccctcagagatccccagagaccctcagagaccctcagagatccccagagactttcagagacattcagagacatccaggctgggcatggtggctgacgcctgtaatcctagcactttaggaggctgaggcaggtggatcacctgaggtcaggagttcacgaccagcctggccaacatggtgaaaccccgcctctactaaaaatacaaaaattagccaggaatgatagtgcacgcctgtaattccagctactcgggaggctgaggcaggagaatcacttgaacccaagaggcagaggttgtagtgagctgagattgtgccactgcactccagcctgggtgacagagcgagactctgtctcaaaaaaaaaaaaaaaaaggctgggcggggtggctcacgcctgtaatcccagcacttagggaggctgaggtgggtggatcacaaggtcaggagattgagaccatcctggctaacacggtgaaaccccgtctctactaaaaatacaaaaaattagctgggcgtggtggtgggtgtctgtagtcccagctaccggggaggctgaggcaggagaatagcgtgaacctgggaggcagagcttgcagtgagccaagaccacgccactgcactccagcgcaggtaacagagcgagactccatctcaaaaaaaaaaaaaaaaaaaagataaatattcagagacattgagaccacccagagatcctcacagaccctagagatgccctggaaagcccagaggcccccccccccgcgaaagaaaaaaacatggagagccaggcaagaagctccctggggtggccccgcctcaattcaaccccatcaccacattcacccaacaccctcaggtcctcagagcccaccctgaggtgggtgatgccagagtccctccaggcctcagcctgggtgctgccccaagaaccctcagtctaggcagtggggcaaccatggatgcctggccctgtggagtcagatcaggctggaacagggtcaagggctgccctcccccttccccagccacctgcacagaccccaaatctcccaccccagcctcctccttcctggttttctgccacctccatcctctctgtgacagccatgaggcagagcaggggaatttaaaaaccctcccccacgccaggcgtgatggctcatgcctgtaatcccagcactttgggaggccgagttgggaggatcgcttgagcccaggagttcaagaccagcctgggcaacatagtgagactctgtctctacaaaaaaaaaaaaaaaaatctttttgagacaaggtctctgtccgacacccatgctggagtgcaatgctaaaatcattgctcactgcactgcatcctcagcctctgggactcaggtgatcctcccacctcagcctccagagtagctgggtctgcaggcacatgtcaccatgcctggctaattatctgtattattttaagagatggggttggccaagtgcagtggctcatgcctgtaatcccagcactttgggagatcgagagcaggcagatcacgaggtcaggtgatcgagaccatcctggctaacaaacacagtgaaaccctgtctctactaaaaatacaaaaaattagttaagcgtggtggcgtgcgcctgtagtcccagctactccggaggctgaggcaggagaatggtgtgcacctgggaggcggagcttgcagtgagctgagattgcgccactgcactccagcctgggtgacagagcaagactccgtctaaaaaaaaaaaaaaaagacagagagagaaagaagagagatggggtttttgccatgttgcccaggcaggtctcaaactcctgggctcaaatgatcctcctgcctcagcctcccaaagtgtcgggattacaggcgtgagacactgtaccaagccaaaaactttatttatttatttatttttatgagacaggatctggctgtgtcgcccaggctggagtgcagtggcacattctcggctcactgcaaccttcccttctcgggttcaagggattctcatgcctcagcctcccaagaagctgagattataggtgtgcgccaccatgcccagctattattattattactattattattattatcattattattattatgtagagacggggttttgcaatgttagccaggctggtctcaaactcctggcctcaaatgatcttcccaccttggcctctcaaagtgctgggattacaggtgtgagccaccacgtgctgcctaaaaaagtttttttaaattagccaggcctggtggtgtgcgcctgtagtcccagctactcgggaggctgaggtgggaggatccgttgggcccaggaggtcaaggctgcagtgagccatgattgtgccaccgcactccagcctgggccacagagtgaggccctatgtctaaaaaatataaattaaaaaaaaaaatacaaagtctgcccgcaggtccgctgctggtggaatccagtcttccccagagagatggggagggctgagccaagcaccagagaccctcaataaggcctggaagtctggaggggtctgaggggctctggagccagcggtcaggaccagaagtaggtgtaatgaccatgagtctgggccagggaggacttaaaggaacggctggaaggtggactgacatggacattgtggacctatacgcattcattcatcaaacgatgattgaggctggctcagacacttccaagctgtgtgacctaggacccgcacctcaacatctctgtgccttggctgcctcctctgtatttttatattttttattttattattattattattatttttgagatggagtctcgctctgtctcctaggctgaagtgttaggggcatgaacttggctcactgcgacctctgcctcccgggttcaagcgattctcatgactcaacttcccaagtagctggaattacagatgcacaccaccacgcctggctaatttttgtatttttagtagagacggggtttcaccttgttggccaggctggtctcgaactcctgacctcaggtgatcctcccacctcggcctcccagagtgctgggattacaggcgtaagacacagcacccagcccaaagcatgactttttaataacatgagaagaccttgtttaaggtcacatggccttgttagttatagtaatgttttttttgttgttgtttttgtttttgagacggagtctcgttctgttgcccaggctggagtgcagtggcgtgatctgggctcactgcaagctccgccccccgggttcacgccattctcctgcctcaacctcccaagtagctgggactagagtagctgggactacaggcgcccgccaccacgcccggttaattttttgtatttttagtagagacggggtttcactgtgttagccaggatggtctcgatctcctgacctcgtgatccacccacctcggcctcccaaagtgctgggattacaggtgtgagccactgtacccggccttagtaatttttgttttgttttgttttttgacgcagagtctgggctcagtcacccagcctggggtgcagtggcgcaatcatggctcactgcaacctgcacctcctcggctcaagtgatcctcctacctcagcctcccaagtagctgggattacaggtgcacaccaccacacccgcctaatttttctatttttctggtagagacagggtttcaccacattgcccagactggtctcaaacttctgggctcaagcaaccctcctgccttggcctcccagagtgctgggactacaggcatgagccaccacgcccgccctgctggttctagtaaaattttaaaagccactgaatacctttgggagagtcgtggggaaataaaacgtggcatgaaggcagccatggtcggccaagcatgtcccacctgtgaggcttgcatttcttggctgacagtgacgctgaccacgggaggccacgtcatggccacatggctctcttgagagcagtcttcaaccacagacggaaggagagttggctgtaaatgcctccgctccctccaccctcaggtaggacaacagaagcacctcttctgttgctgtctccctgagaaaggacccattcctggtggcccacgttgaacctgctcgctggcaccccctgcagggctccccttcccttcctgcctctttaacccccaggagggcttctgggatcacctctcagataatgcccctgaattgagtcttagagtctccttcaccaagccaccaattttttttttttttgagactgagtaccgctctatctcccaggctggtgtgcagtggcaccatcacggctcactgcaaactccgccccccaggttcaagtgattctcctgcctcagcctcctgagtagttgggattataggcgcccgccatcgcacccggctaatttttgtatttttagtagagacagggttttgccatgttggccaggctggtctcgaacctgatctcaggtgatccgcctgccttggcctcccaaagtgctgggattacagtcgtgagccaccgcacgcggcccaaaccaccaaattaagacagttcttttggtttgtttttttgagacaaggtctcactcggtcacccaggctggagtgcagtggcgtgatctcactcactgcaacctccacttcctgggctcaagcgatcctcctggctcagcctcccatgtagtggggaccatgggtgtgggccaccacacttggctaattttttgattttttgtagagatgagggtcttgctatgttgcataggctggtctcaaactcctggcctcaaacgatcctcccgtcttgccctcccaaagtgctgggattacaggcatgagccaacatgcccggcctaaatcagcaaattataaaggagattagacagtaatagtgctgtggtgctgatctgcctatggagtggccattctttttttttttttttttgagacagagtctcgctctgtcatccaggctggagtgcagtagtgcgatctgggctcactgcaacctctacctcccaggttcaagcgattctctcgcctcagccttctgagtagctgggattgcaggtgtgcgccacgtcaattggctaattttttgtgattttggtacagatacggcttcaccatgttgcccatctgttctcgaactcctcagctcaggcaatctgtttgcctcggcctcccaaagtgttggtattacaggcgtgagccatggcgaccagctgtagccattcttttattattttactttcttaataaatttgatttcacttaaaaaaaaaatgccatggccaaaaaattagagtcaaggagtcgggagagtaggatggttcaaagatttttcttgttttgaaacagagtcttgctctgtcacccaggctggggtgcagtggcacaatcatggctccaccacatccagctaattttttattttttgtagagacaggaggtctcactgtgttgcccaggctggcctcaaattgctggcctcacgtgatcctccctcctcggcctcccaaatgctgagattacaggcatgagccaccgtgcctggcctggttcagtttttgttttttctttcttttttgagtctgagtctcgctctgtcatccaggctggagtgcagtggctcaatctcggctcactgaaatctctgtctctcaggttcaagcgattctcctgcctcagccgcctgagtagctggaaatacaggcgcatgacaccacacctggctaatttttgttttttggagacggagtctcgctctgtcgcccaagttggagtgcagtggcacgatctcggctcactgcaagctccgcctcccgggttgaagccattctcctgcctcagcctccagagtagccgagactacaggcgcccgccaccacgcccggctaatttttttttgtatttttagtagagacggggtttcaccgtgttagccaggatggtctcgatctcctgacctcatgatccgcccgcctcgacctcccaaagtgctgggattacaggcgtgagccaccccgcccggcctaatttttgtatttttagtgaagacagggtttcaccatgttggccaggctggtattgaactcctgacctcaagtgatccgcccacctcggcctcccaaagtgctgggattacaggcgtgagtcaccgcgcccggcctggttcagttttaaacgggctagtcaaagaaggcctctctagaaaaaaatatggacaaacaagaaaaaaagatgcgcagggaggagttcaaaatggggacaggatttttgggggtgtggcgtgactgggtgatgttttctatatttgcctcctccttgccatgaaataattcaatacagaaatatgtaaatatacatttgtaagccgacctgagagcaagggcaaggtcaagagaggcagactagattccaccgctgacccttggggtcttagctcagggaggcctcaaggggatgctgggggcgggacctgctgggattctcaggagttgctacattgagtctctgctgccctcaagtggttatattcggaaccgcaggtgctggctgccttggcgaaggcaggcaactccgtagaccacacagaggagttcagcacagaggggacattggtaatctttagtccatttgctcagcaacaaatatttgttgagcacctactgtatgccagaaagtgttataagcgctagggacacagccctgaacaaaacatacaaatttcggccgggcgcggtggctcacgcctgtaatcccagcactttgggaggccaaggcaggaggatcacttgaggccaggagttcaagaccagtctgggtagcatagtgagacccccttctctacaaaagaaagcaaaacatagaaacctcctgcccgcatggagctcaagggttcctggggcaataaatatgcaaaaattaacaaacaagatatccaggaagggtcaggtgcatgggctcacgcctgtaatctcaacactttgggatgccaaagtgggcagatcacctgaggtcaggagtttgagaccagcctggccaacatgatgaaaccttgtctctactaaaaaaatacaaaaagtagccgggcgtggtggcacacacctgtaatcccagctactcgggaggctgaggcaggagaattgcttgaacccaggagagggaggttgcagtgagtcaagattgcgccactgcactccagcctgggcaacagagcgagacttcgtcttaaagaaaaaaaaaagtatccaggaagatccaacaaggtaatataatccaaacagaggtttggggacctctccgagggtatgtcactggagctgaagcctgaaggatgaagagaagctggccatggtgtacagttgtagaaaaggtatcccggccaggagaaaacccaatgcaaaggccctggggtgggatgacctggatgcatttaacataatcatgtcaaaacatgctcaatatcaggtacttaccaagtgtggactctgtggtgttgttaagccaaaggacccccagaagggaagaaaagactcgtgtccctgtaccatcccgagagggatggaccttagggtaccacaggaaatctttcttccaccagtaagaagagagactgaatctgggcacagtggcacacatctgtagtcccagctacttgagaggctgaggcgagaggatcgcttgaggccaggagttcgagaccaacctgggaaacaaagtcagaccccccacacacacacacaaaataaaattagctgggcttggtggtgcacgtctgttgccccagctactcgggaagctgagctgcgaggatcgcttgagcccaggagtttgaggctgcagtgagctgtgattgtgccactgcactccagcctgggtgacagagtgagactgtctctaaaaaaaggaggatgagggccaggtgcagtggttcatgcctgtaatcccagcactttgggaggctgaggtgggtggaccatcaggtcaggaggtcaagaccagcctggccaagatggtgaaacgccgtctctactaaaaatacaaaaattagccgggcgtggtggcaggcgcctgtaatcccagctactcgggaggctgaggcagagaattgcttgaactcaggaggtggaggtttgcagtgagtcgagatcgcaccacggcactccagcctgggcaacagaatgagactccatctcaaaaaaaaaaaaaaaaaaaaaggaggaggcggaggctggagctctagacagacgaggtgaggaatgggcattgtcagggtacctcgaagtcagatctggtgcctccactccctgatttgtgtccccaggcaagttgctttgctgctctgaacctttctcagacataggtgagtgccacctatgggtctctcacacgacacccttgatgccgtgatgagcctcagtttccccatctgtaacatggggagaagaaatgacagccaggagtggtggcgcacacctgtggtcctagctacttgggaggccaaggtgggaggactgcttaagcccgggaggtggaggctgccaaggcagctggttgaggttcagcgagagcactgaagcagagcgctgggtgcacggtagctggggcttccagtagctggctctgagttgaagattcaagggcaggtgggatcaggtggggtgaggggatacctgggaggtgaccccaggaagctcctggtagggaatgggacatgagacaggaagggaaggagccctacagggggcaccaactgccaacagacatgacacatgtggatgagtggcgctcagccccgcctgggacagctgggggacagtgtagatgctcatctcagaggggtcccactcaggggcgaggagcgtggggtgttttggtttgggtttttttttttttttttttagacggagttttggtcttattgtggacgtgggggagggacgacgaacgtgagggtgggaggttgtaggttcagcagaggctcctcggccaggagtgcaatggcacaatctcagctcacggcaacctccgcttcctgggttcaagagattgtcctgcctcagcctcctgaatagctgggattacatacaggcacgcgccaccacgcctggctaattttttgtaattttagtagaaatggggtttcaccatgttggccaggatggtctcaaactcctgacctcaggtgatccactcgccttggcctcccaaagtgctgggattacaggcgtgacccaccacacccagccctgtggggtgtttatccacccccaacctcattttgatttcccagaaaacagacccaagatggcacactgagaatgtggggcacatgggtatccggccatgggagctggggaagggccctgcagggggtgcccaggagcaggggaggtcgtgggaaatgaagctcagtcctgtcggagaccttagggagactggcatgtccttagacggggcattcccagggcaggcacggtggtggctcacacctgtaatcgcagcactttgggaggccaaggcgggcagatcgcctgaagtcgggagttcaagaccagcctggccagcatggtgaaaccccgtctctactaaaaatacaaaaattagccaggtgtggtggcaggcacctgtaatcccagctactcaggaagctgaggcaggagaattgcttgaacctgggaggcggaggttgcagtgagccgagattgtgccactgcactccagcctgggcaacagtgcaagactccatctcaaaaaaacaaacaaacaaaaaaaacggcattccctcggccagagaaagctacaggtgaggagtagcagaagctggcggtggggagtgcagccacgtggttaggcccaggatgggctgcagccagcgtgcacccagagctaccagcagctattacagaccctcctcctagacctgggatttctaagagacacctcgagtctcccagaccagacagggtactggaagcactctgatgggtggggtattgcctctgggtcgctcacatgacgtccttggttcctttacgagcctcagtttccccatctgtaacatggggagaagaaatgatggctgggcttgttagtgcatgcatttggtcccagctacttgggaagctgaggtgggaggatcacttaaacccggaggttgaggctgcagtgagctatgattgtgccgctgcactccagcctgggtgacagagtgagacacccatatctaaaaagaaaaactagagatgctgccaccttctttggtctggaaggaggacattaccagaggatggaagccagttcccaagggttagtatgactctggagttcaagtgcagggcagaggggtggggcttcgatgtgtggccggtgaaagccacacaaggtgctagaagcacagaagtgtaccggctttggttaagctttgtggaggacggacgtgggggtgtgagttgcaggtttggcagaggcttcttggccaggccctcctgtatcccttctgtcacccggagtccctcgcagccctgtgggattggtggcatgacccagtggcttggaggggtcactgaagttcagctgtttcccggtcaaggccacacagtgagccagggcacagctaggttcaaacccaggcccagagcctctatctgtgagtttccgcctccaggcaactagtcttggggtataatccccatttcagaaaccctagctggctgtccaaggagtgaggctgtctgaacacccctctgcccatgctggccacccccagccttcctgagtcaaaggcccagctcctcccaccccccaccctcgacctaccctcgtgttcaccagctgctgtggctgctcccaccctggtgttgtttgggttttaatttttgtgttgcatttagaaaattacccataattacagcttctgagaggaaacggtctcctagcgcagacccggctcccagctgtggccgcctcccacgcacgcacggctggggaggggttgcagggggcgccagccccagtcctggcccctcccagggccccccactttaatgaggaggagggagggaggccgtttccgccacctatggagaagaaaaaccaccagcaggaaaacccaacccggcctcctctgcaggaatggggagtactcgtgggcccccccactgctgtgtcctcaaggagacaggacccagaggaaggcggaggcggccaactgaggacgggatgcgttatttcatccgaatactgccaagtccaactagggactgtgcggaaacagtcttgcgggggcagtgcccagggaaggcttggaggaggaggaggaagaggaggagggagaggaagaggaagaggaggagttggcctcctcccccaggaggaccaaggaggaacccttggccaaaggaggagcctcagtaggccaggccagaagccagagaaaaagcgttccaggcggcaggaaccgctagcgcaaaggcttatgggtgggactgtgcagggtggatccagggtgagggtacagtcggccccttctcctggcaacctccctgccctaaaagaagattctccttagggctcctccaggcacagcccctgacccgtatttaggggacatccatggtgggtgactcaccactgtccaccccaagaagcagagacccagccgaggacctgccctgggccccttccccggggcaacctccccgccccctctgtgccaccttgatctcactggcaacggagcttcttaggtttttttagtttttgttgttgttattttgagacggagtctcactctatgcccaggctggagcgcaatcttggctcactgcaaccttcgcctcccgggttcaagcgattctcctgcctcagcctcctgagtagctgggattacagacgcccgccactacacccagctaatttttgtgttttgagtagagagggggtttcaccatgttgtttaggctggtctcgaactcctgacctgaggtgattcgcccgcctcagcctcccaaagtgctgggattacaggcatgagccaccgcgcccggccggtttttttagtttttagtaagagtcttggtctgtcgtccaggctgaagtgcagtggcacgatcacagctaactgcagccttcacctgctgggttcaagccatcatcctgtctcggcctccgaagtgctggggctacaggcacacgctgccaccacgtgcggcctcccatggagcttcttaaaatcgtgacgtagatcccatcctctcctcgcggctccacaccctcccattgctccctaatgctcttagaaaaaaatctcaccccctcccctctgggcgtggtctagctctctgccttccctgccatcatccccctcttcttcaccctgccccggccacggctgcttcctggctctgcctccagcgccttcgccgtgtgcccacctcagggccttggcccttactgtgactacagtctgaacattccacttccaggtctttcaaatccacccctcctctccccgttattaataatttttcctccccgccctgcccgtccttcgcgtgggtggggggtccctttctgcgggttctgcccccgcaaggcgtgcgccctggttgggagtgcgcgcggctcagctccccgacgccgcgtgggacccagggcccgctgccctcgcacttttccgccagcgcccaggctgtgtttggagatccttcccggttgccatgagaaccgcgctcctcgctcccgccctccgcgcctcccccatcacagctctctgggccgccggcgcctcagcctccctccctccttccctccctccctccgcctccgccctcccccgggagaccgaccgaccccgccgtcgcccgtcctgtcaccaggggtcccctccctctcacgcacgtggcactccctgaaattaaccgactgactcgccagcttttgactgtccgcctcccccatcagattctgagctccaagaggtagcaacgtgtcccggctgggtctccggagcccagcacacagtaggcgctcaatacatgtttaatggggtgaagactcacattgacccaaggaaccgtggctcacagggggcgagggaccaaccagggcacacagggccctggggagccacggagctttaggagattaaactgggggtggcaggaggggcatctgccgggcccgggagtgccggttgtcaccaaggctctgtgtgactttgggtgagccacaccctctctgtgcctcattaggagtaggcgctggcgggggcagtggtgggagcggtcattaggatgggagtgacctggacgccgaagcccacgccccccgtggtcccccaggctccggggccgtcgccagcccgaggccctgcggaattgtgcgggcccctcctaccccgccgagccggggcccggaggcccgcgggagaggaagctgggggaaggggcggccggctggacaggaagtgggaagggctggcgtcccccctcccgcgccgaggcccctcggggaggaggcggggctggggccggtcctgcccttcccttcctctccgcgggtctggagccccggcggctcccgacttcccgccggccagaaggcttggggtgggggcggggggttctcacgtactggggggcggcctctatcggggaggcatctgcggggtcagctggcagcgagagacatccagacattcacacacaaacacacacacgaaacgtgagcacagagccacacacaggtcctagggagctggcggcccacccacgcgcggagacacacacgtgcacattcggcacacacttgtgcacgcaacctcactgagcgactcggcccgactcggacccacaactgccaccgcgcagccagggacagtcgccgagacagcgataatttattgggtgtttgcccgccccccacgcacaaggatgcacacgtgcactcacacgggagccgcgtgtttgcacacacgcgggcttgcctaggaaaaaagaggaatagccgtggcaaacacagaaacatctagacccagagtcaaccgcaccgccttcccctaccctgcccatccacacacgacccactggtacccgggcatccctgccctgcgggggtccctgactcagtatccgcccccaccctctctgaacacccctggtggggggatgaagggccctaaaaggggaaaagggcacccactgcctgcaccctgactcccgcagacaaaggtgggatgcgccccatttacagctcacagcaccgaggctgagaagcccaaacagcagtcacccagcacctagtattgtcaccgggtgttacttcggggtggtgccaggtggctcccacagcctgggtactataggagctttgtgtctgtgtgcctgggttgtgtctgtgttgtgtgacttcgggcgggacgctgagtgtccgcaggccctgtgactgtggagctgggtagggtgtggttctgaggaggccgcgatagtgcgccccagggtgactgtgagttaactccgtgggctctgtccacggctgttggaagctgtggcacggccttgcataagcgcgcgcctgcgtgaggctgggtgcctgtgtgcggtggcctgtgtttagttgttccaggacggccactgtgagctgggtgtgtggcagtgtatgtgtgtcgctgggcgggctgtatgtgcggtggttcccacccttgctgagtgtgggtagctctgcggggtgagacacccaatgtcactgcctgaggctttatggggctatccgcagtcgttccagcagcggggtacacttttgctgtgtggagcgctatgttgagtgtcgctgcgaatgtgtgtggctgggtgtacaacaatgtgggtggccggctccatttgaggtgagtgaacgtgtgtgtgcacgcgcgcgtgtgcagccgcgatcagctgtgcgtccctgggtggccgtccgggatcctgacccgcgagtgtgtagccgcgcccccaccccccgcggcgggcactgcgcgtgcgcgctccggcggcgggacccacccgcgcgcccgccatcgcccctttaagagctgcgcccgcgggcggcgtagaggcagcgggcgggggcgcgcgcggcgggaggaggggagcgcgcgtttcccggaacagcccgcgcggaggaaagggaggaaaaaaagccaccctgcggccggggccggagctggagccgccgctgccgccgccgccgcggccgtctggagctcccccgcgcggacgatgcctgccgtgcccgcctggggctcggggcggtgaggcccggggcgcggggtagctatggcgacggcaagcgcggcccgcggcgccgcctgacaggtgtgggccccggcggcggcggcgtggagcagcatgtacgccaaggggggcaagggttcggccgtgccctccgacagccaggcccgcgagaagtgagtgcggggccgggggcggggctcggcgtccgcgctcttccgtgggctccggcgcgggcgggcaccgcgcggggcacgtgggcgcgggcggcggggagcgcgagcctgagcgcgctcgaggggtcgcgagattggcgggggcgcgcgacccccgaggggcacgagattggcggggggcgcgcgagaccctgaggggtcgccggagttgagggttggcgggcgacccgaggggcgctagacgggagtggacgggcgagaccggagcggctccaggggtcgcgagattggcgggggcgcgcgaaacccgagggcgcgagatttgagggggcgcgcgagatccccgagcgggtctcgggggtcgcgaggcctcctcgagacgtgggtgcgcgaggctgcggacgcatggggatcgaggtcagcgaagttttccgggacgaacaagagtgtcggctcggggaccccagtcgcctggggtagagctggagagcggctggaggggcgcgccgccacctgtctgccctggccccagcagctgtgtggggcccctggggaagccgcacggttcacagtccaggggcgggtggggacgacggagccgctctcttgataccactgaagagtgcatactgagggccccttttgttctgggcgtggctccaggccgtgggtaccaggcgctctgaagctggtaggggcaggttccaccgtgcggatggaggaagggtcgtggtggggctgaggtctctcggggtggggagtcagccgagtgtgctctccgggtggaaagcatttgaaaggtgcttggagcagtgaccgtcccgcaggaagggcacggggcagtttgcagtgttgttaaaagtgcccagaggccgggcgcggtggctcacgcctgtaatcccagcactttgggaggccgaggcggtcggatcacgaggccaagagatcgagacaatcctggccaacatggtgaaaccccgtctctactaaaaatacaaaaattagctgggcgtgggcgcctgtagtcccaactactcgggaggctgaggcaggagaatcccttgaacccgtggcgcagaggttgcagtgagccgagatcacgccactgcactccagcctggcgacagagccagattccatctcaaaaaaaaaaaacaaaaaacaaaaaaacagtgcccaggaggaggggagtcttgtcatagctgatgggggacttccaggatccttgaagttgagccacctggagtggcccgtggtgtggaactggccacccaagcagagaggaggctgggtcagcagggaggggtcccatgaggacctgccttgagggccaggccaggagtgaggacttgaatgtctgggtgctggagaggagccctggacgttggctgagtgtcccccatcctgcctcttctgcctaggctgacttgggatgccccacccctccacaaagatgcctgtcccctctgcccagcctctgggtcattttggagaagaggctcttctggctagaaggtggtaggcaaatgactgcactgtcaggcctcccttgcctgtgtgcagttaggaagatgagctccatttccaagcacccttaagcccaaagactttttgaaactggcctctggctcctgctcaggtcggaagcaggaggtgtctgccatggtcacccctggacccctggtctgtctcctgtgtgtctccaggcagctgctggctctggaggcatccacccacccagtgggaatcgggatcgttcactgattcagcatatctgccctgggtgtccctgggtgtggcagtcgggaaggcaggctccggtcgggatggcagggtcggtggccctgaagaagcccccaccccagcagggaggcaggtatccagttagcaggagaaagcaaagtggatgatagatagcgaagggtgaggggatgtcaggtggagggcacagcaagtgcaaaggccctgatatgggaccaggaaaaggagctggggctgggcccaggtggaggaagaggcagcctgcaagagtgccagatgggccccagtgggttgtgtgtgcagaagtgcgctctggctcccaggtggagtggggcttataggggtcaggaacagaggctgggaggccctggggatgtggacacagttgtctgaaagagagctggggaggccgggcgtggtggctcacgcctataatcatcctagcactttgggaggccaaggtgggtggatcatttgaggtcaggagttcgagaccagcctggccaacatgatgaaaccctgtctctactaaaaatacaaaaattagccgggcatggtggcgggtgcctgtaatcccagctactctggaggctgaggtgaaaggatcgcttgaacctaggaggtagaggttgcagtgagctgagatcgtgccactgccctccagcctgggtgacagggcgagactccatctcaaaaagaacaaaaaagaaaaacagtgaaagagagctggtggcagcctggacccaagtaagaaggaagagatttcataggtttgagccgggggtggtagggtgagggggttagctgcattcctggcccccttcccatactgtcctcccactccccaacctgcccagcagaggtgctttggggacactggcctcgggactcaaggctctcggaagtccctcagctgccagtggggaggctgcagggcccatctttggtcagagccagcctgcatgcttccatttcacggagagggtctcgtataagtgttggtttggaggtgaggttcctctatgaaagaaagcctggaaaacgccagatggccgcatgcacccatttcaacgaaagggacaccagggccctggagaggaagccacctgatgagaactcagcttctctggcacagatgagctctcagaggcagccccaggcctcagtttcctcatgtgaaatgtggacgacccatctttcaggatctttgcaaggactgggtgggagcccgtaggcagagcacctgccggggcagccacgcggctctcaggaagtatctgcctcgggcaagccacttcctgcctctgggcctcggtttccttctctgtgaaatggggtgaagaggttacactgctccaaaccttgactctccagcactgcacttttcttcctgcaatgagcctcatgcctcctaaaaatgaggcgctgcatatccttccttctctctctggccccaatcctgagccccttctggctgcccttggagcctacaggccttcccggcttacactaggtctcggccagctggctccagaaagggaccgagcacctggtgggtgcctgccctcgggggctcgcagcagatggcagtgactgtggagtgcaggggcagcagagtgggctgagggaggctggggtctgagtgggccacttgcaagaagaggggcatgtgtatatccttcagcactcaagtgttgccaggcaggttgagaagaggtccatgaatcacagccatggttggtgttgcctggcagctcgtgggtttctcccgggcttgattttgagccggcacatggatgtcggtggcttgttcatcagcctggcaggtaagccagggatgggattcacgattggacgtggtcattttggcccctggctggaaatggctatgaggggcaggtgtggagggtagtaaggagaggccgccactttgccaagaagctgccagaggcctggcctttagggttggcagaggggagggaggacggcgagggttggagggtcaggagtgagacctggtgacggatggcaaggtgacacaaagccatgagtggcaggtgtctcctgccccagcagcatctgtgtctaggaaggcgctgagcagggagcatccattgcagccattctgggtaattatggtaactcgcgtcattacggtggtagctgtggtacatttcaggccaccaggcgctagcaccccatcctggctctgcttccctgcacagcctcatgctcgctccaggtccaggcgccccatgtcctccgagtcttgtgttccttctgcagggagagctgcctgctgctcttccgggtgcctccctgttttcctttctggccacctgcctgtgtgacacagggagccctcataggtgacaggccctgagaggttgtaccggcccagggcaggtggccggtggggggcagagggcatgggtgatttgcatccagagcccttccctataactgagctcagggccccaaccggtggcgcccccagacctggcccccggagcagtcctctgggaggggaggaccttgtaggtcccaaaactccctggccgaacagccaggcttcaaaacttttcacccaaaacaataacaacccacagttcttccctggagactgaatcctgtttaaaataaaaggaccaatgtggaagggaaatcagcaaaaccgaaaacttcctttggcctcccatcgctcccaggataaactcccaaatcctcagtatggacagaatagctgctgaccttcatcagtacttaccccatggttcgcctaatcctcccggcatcccaggagggggtccccgggccggtttgttcattcactggggtgactggggcccaggatgcccagctccattctaaggtcgttgcagtgagcagactccaagtccccgccccacgtcaagctacattccattgggggcccaagacagagactctcagatggaggagacggagcagggtgggggcttccatgtgacagtgaagccccgagaggtgacactggagtctctgggtggaagtgccccaggcagggaaacagtgcgcagaggccctggggtgacagggcagccagtgtgtgggtcggggcggggggcggcacaggagggtttgaacaaggaacatgggggtggggggagcagcacctggaggggactctgtcgtaatccaggtgggagacggtgggtggcctggcccaggtgtgcagtggaggtggggagaggggcccaagtcaggaaagagatttccttcggtgtttttttaaacgcagtgatgtttggggacagctgggtggatctcacacaggtgcacgcctgtgcgcacgccaccagaggctccttggacaggatgcatgtgtaaaggccaagctgacagtctctgagcagggagggggagaatggggaaggggtgggggctcagggtgtcgaggctgggcctctagatgtcaagtgaacagggaatcccaagtttggggaaggtcaggccatagcaccctctggacagcccctacttgaaggcatcatcaaaacaggacgggcggccacacagggagagcagaggagaagacagagctggtagccgggggcgggggctggaggcaggaggacagcaggagggggcggagagggcggggtgggctctagggggccacctcctgggttaggcacttatggggacagtcgaggaacaggagacaaggaaggcaggtagaacccttcgcagccccctccttcaggagtccccctgggccttttggacagccgtgccctgggtgtggggtacccagaatgcagcctcagcaggacctcccgctgcccccgccctcccggggccgctcaccagcgttcctgcaactctgtcttaccccactctggcctttcatgccccctgctctgacccctaagtggctggggtgggaactctcttccacacctggcaggtgggttggcactgggctccccaggctagtcggtctgcccctggaacctgctcaccctggccttgtgtgctccccttccactgatggacgcaggcctgtcagccactagccacagggaaaagctcagaagcctctagatgggccagggtgccacagaagtgagctagacaggtgggcctgcaggccgccgggccaggaaagtggaggaagagcaggtgtgggagactggaggggtggaggtcaggatctagcagggcctgggctgggggcagtctcttcaagagtgctgtgatgatgcaggggtgaccattgggcgctgtgtgtcctgccccatccctgcccctggggtggccttcacagctcatgtggtgcagtgtgagcctggcgcactccaccctggaccgcctcccctccctgatgtcacccccccacttgcctttccgtagcctcagcgccttccaagctgccacagagctcacctctcttgacaggtattgcctgtctctgtctctcccctcaagaacatggcctccaggacaggggccgggtgtgtgcactgcgcaaaaggcacttcatggatgctggaggaactaatgaagaagtgaatgaacgaaggaggggaggcaggatgagatttggggcaagggcagtgcccatgaggaccaggtgggggcaggaagtccccatgttctctaggggccggggcaggaacaggaggactggaaatctgaaagggacttgggggccctgatgggtggtgggtgctaggattggagcagcctggctgggagggagcagagcgtgagtcaaaggaaggttattttaggatggggcccgcagccagagagggcggcgcagctgagctggaggcggctgtggaagggcccccaggcctgcctgcttctcgcctctagggctcagcctcaggctggccctctggtaccctgtcttgaatctaagagtcccccaacccccagcagactctcgtggtccctagctggacagtacaagagctctgagcagggagcggctcagttccagggaggtccagaagggctggtgccacaggactgggcgaccctttggatagggggtttgtcctctgctctctggtgtggcagctggactggagcggggtggacagtccggcctccccctgtgacctgcagagggccgtgctggagccacctggctgggcgagggtgactcaggtccaagcccttggggtgcacagtggttgggagggtgagtccaggggtccctggcaggctggggactcgcgcagagccctgtgggtgtttgggtagggcagcaccactgcagacatggcactgcaggccctacctcccctggccccccacctccattccccagacattgccccaggttcagcactgccctgactggggacagtctgcagaaagggttgaggccaccatggtggatgggcatctcttccccaaggaagagatggggtccagggactgcaggggatgtggggtggaggaccccttccctccttccttcctgggccggggaggctggggatgagtttggaggtgggccctgagcacactacatggcccagggtgcccagtggtcgtccccaccctgcacacacacaggaatgacactcctctatggaggagacctccccagcgctgaggcctctctggagtctcagtgttggcaggacatggccaggacttggtcctcgagggagcgtggaacacagccgaattcggcccggaattgggggtcacggatgcctgggaggggcctgcaggacatagatggataactatgagctgtccctgctgagcagctggtggggaggccacctttccacccgccctcctgagagatggaggggctttggggtgggcccttgccttggagagtctgagctccctgggccgcctcgcccccacaggttggcgctgtacgtttatgagtacctgctgcacatcggtgcccagaagtcagcccagaccttcctgtctgaggtaagccaccacctccaggctggccctccctcctcacccacactccgggggtccttcatttccactggggatccagggggtgggcccgcgttgcccctctgatggccctgggaactgagggctctgcagggtccaggccctgggctagcatccaggcatctggtccacatgcccagccgggacctgccacacatcctggggccctctgcccaccctgttacccttccctccccactccctccctgcccagatgttctctgggcaccctgctgggtggtggggcagggtcaggtagggccaccccctcaccaccttcctttccctgcagatccgatgggagaagaacatcacgctgggggagccccctgggttcctgcactcctggtggtggtacgggctgggctgctgtgggtgggctgtggaagggggttgagggaggcacgtggagcaaccatcttcccctttggcccacagcgtcttctgggacctgtactgcgcggcgcctgacagaagagaggcctgcgagcactccggcgaggccaaggccttccaggactatgtgagtcctggccccagggactcaggggctccagggcgggaggtgtgctgggcctgtggctggggaggtggggtggggggctgcacagccagaggagggctggggatggtggcagtttggggttgacaggcagagctgcagcctccactcaggctcttggccacttttggggggtccttccaccctccacttggtccagggtcactcacagagtaagggaaagctctttccactgcacacacttctgagggtccccacagccctcccacccccattggggcactggggggtgccatttccccgcatctcatgtgagcctgcgtggagatgggggaagctcactgccttccccctcctctgccgtgtgtgcattgggggtcactgctgctcctctgagcggggagcacaggtcggggtgcctgatgggccaggcactgggacactttctgaccttgccaggtatctggagctgcccactccctctctgctgtcattttccctctgggttggaaaaggtcagaggccggcctggagtggaggctgcctggctaacactaggggatggcagcctcctgttgtcatggggcagcagatggcagcccttcccttcatcctctgcgctggaccacctggccccctctgttgggtctgagggggaggtgccggctctgccggtgggcgtctggggggcgccagtcccgcccaccccctaccccctgtgcgccagagcgcaggccccagcaaggcagaggcggcccgaggggtggggcgcccatgtctctgaagatgcctccagcactctgcatgagagctgggcaggctgaagccctcctggcgtcactgctgttcacccccatggtgtcccactactcgtgtgtggtccccttgtcctagtcccgctagatctggggccccgggggtgtctggagctgtggacttgggcgactctgcccccatccctgccgtctgggtctagcatcctctctgggcgccccccgccgggccaggagggcggagctggagagtcggcgtgaacgcgcttcccaggcgcgcagcggttaccatggcagcgccggcgcagagcgtagaccgcagggcccagggcggaggccgcccaagccctggggtgaccgaatccccgcggggactcgtcatgccgggccgtcgcctccgttgctctcgctctaactgggggcgccttgcccgccgagcctgcacggaggcggccccttcctctctcgccctccgaggcgggggaggggggcggggggggctctgttcgcccctccccggctccctgccgaccttggcgtctccaggaaacgccggagcgcccagcccatcgccatggcaacgcgggccgggccggctcctcttcagggatgattgacgtagggggtctggcccgggccaaccgccggggagggcgcgccgcccgggattaactgctcagggcctagagttgggaagctgcgggtcgcagggggcggggggggggtgcggtggagcgtccccgaccaggaaacgctcaggcacccgctgtggcccgtgaggggattgccctccctgcggggtggacagacacagggctcaaaggtgccccctccccaccctcggggagtggaccggaggggccgcctgggagggcagctgctccaggccattgtgtttgcgggagggggcggggtgggggccagagcccagaggggacctggaagtttggaactgagaaagtggcacaggagtagggcacgagggctttcgaaggatttgttttgggccttgggagtgctcgccgtcacggtgggcttagggggctcccgcctccagcccctcccccagtttaggaccctggcgggaggcttgaggctaacctcagagaaggggcaggaaggggtcaacccgcagccccacagggggagggaggatttctccaggagccctcctctaggcagggggccccttgcagcagtccctgagggcaggaaacgctgtgtgactgtaggcagagtgctcaacctctctgagcccaagtggctgtagttcatgccacaaacacctgagtgtccctgtgtgctggcttgggccgaccccagagagagcccatcaccttctttttggggtttggggcttggcctggaccatacagacaggggccaggagagaagttctcccctccctgtccccagacgtgttcctctgccctcatagactgggcctcccttcccacctcacatccccctccccaccttccccctgccagaccctgtaggccccatagcagacaggtctagaacttggtccccggccaggtctgggctgccaccacaatttctggcagatacaggaagccccctctccagcaccctgtcttgtcgccttctccatctgagagaggctgggggatggggaccccaccccagaatcctgcttttcaccctccctcctggacgaagggcagggtggggtggggcaggggtctacacttgttctaaggtggagccttcagggaggctcttgaaactgccggtatatttgtgtgtatgtttatttggggggtcctgagtagagttggggacccagctgagctgccctgccagccaggacgatgcagggccagttgagatgggtctggagtggggagcaggtctgtgagaaacgagggcgacactggatcctgcgtcctacagggtcttcagacccacagatcctcaggccgacaaccccagtgtgctcactgaccaatgccagctcgctgtcccatggggccggccacctgcagagagggggggcacaccccaggtaggaagtgtccaggtgtcctgacctggccctctgggtttcccgcacccttacagagtgctgcagccgcccccagccccgttatggggagtatggccccaggtgacacaatggccgcaggctccatggcggctggcttcttccaggtatggccccggctggagtccactggcccccaactctggctgaacatgcgtttgagggtggggggggtcccacgtgggcagaggtcatgaggccggcaggctggagttgggtgggagggtcctctgtgccgcaggtgtgcccaggtgggcctttcaggggccagcgagggagggcccgagtgcagtggagggtgggtgtctgtgcacttggcctgcacatgtgtgcgcacagggtgcttggggatgcagtagccacagtggtcctggtgaccactggtgcctgagtcctgccctcaagccttcccacaaggtccctgtcccacaggctggcccacccctctgcctccatggagcccctcccctcctcagccaaacccagtagggcctcactcccccccacccacctggttctgtcctcctagggcccccccggctcccagccgtccccccacaaccccaacgcccccatgatggggcctcacggtcaggtaaggagctgtggtgcctgcccctcacacacacacatcccctcccccagcgccgccccctcccaccctcaagccatgaggtcctggctggtgccagctggccgggctttgctggctggttctggaggagggggctccccaggtcgggggccccagcatagcaggaatggggtagctttggggaccagagggtgggggaaggtgctgatccccgcccacctcttccagcccttcatgtcaccgcgcttcccagggggcccccggcccaccctgcggatgccgagtcaggtgagaaagggatgaggggagggcgggcaggagctgggccggggagggagcaccccacactcagtgccgccgcaccccctccgcagcctcccgcaggcctccctggctcccagcccctcctccctggcgccatggagccctccccacgagcccagggtgagtagggaagctccagcccctatcccgccatcaatcagaattccagctctcagagcccagaccttgctgcctccccactgtccacactggggaatggtccaggtccaagtccccttccttctgccccaccccagggcatccgagcatgggcggcccaatgcagagggtgacgcctcctcgtggcatggccagcgtggggccccaggtaagagtggagccctggtgggtggggccttcgggctgtccccggtctacccctcacagcccctttgcctccgcagagctatggaggtggcatgcgacccccacccaactccctcgccggcccaggcctgcctgccatgaacatgtaagaccctgggggatcctaggagtgtgcagttcgcaggccaccaccagcttcatggctgggtcagctggggcaggtcctgaatcctcaggacagccttggatattgtttatttcatggccaccgttgaggggaaactgagacttgaagtagcaattagtctcctggggccagtgatgggttgggattggaacctggcagctcatggtggccacttttccagcaacatctgctgctctgtggtcggtctggggatacagtggagcagggtgtggggggtgtgtggtgagggctgtgatccacatggactagccccagagtctgtcatccgcggtctcttccaggggcccaggagttcgtggcccgtgggccagccccagtggaaactcggtgagcctatggctgggtgggcaggcttggggtggggtgggagggacactgggtgagccgcctggctgactgctcacagctgcccttgtccccagatcccctactcctcctcatcccccggcagctacaccgtaagtctgagcaaagctgggtcacccctgggcaggggttgtgggatggcagatgaggggccatttctcacggttcctgtctcttgtgtgcagggacccccaggaggaggtgggccccctggaacacccatcatgcctagccctggaggtatggcctagtaagaggtgggggtgtgctagggtgggtgtgtttgggggaaaccccgtcacacctggcacccttctggtctcccccagattccaccaactccagcgaaaacatgtacactatcatgaaccccatcgggcagggcgccggcagggctaatgtgagtgggggcttgcaggggtgcttctcgaggcggtgaccccacttggggaatgggtggcccgagtcccacgctgtccccatgcccgcagttcccgctcggccctggcccggagggccccatggccgccatgagcgcgatggagcctcaccacgtgaacggatccctgggtgagtgggcgtccctgctcccgcccacgttgccttccgggcccgtgcgctccctggctgcttccccctgccgtcagcccgcctgccgggtggaggcgtctagtggcgtcctgagccccccgggggccgctcagtgacaggggctgccccgagctggagggggatccagcgaccaaaccagaggatgcactgaccgcccctcccccccaggcccaaccctccacctggcctcagtcccggggttcctggcgggctgtgcggggcgggggcgcgtcggcgggggcagcttgcgagggtcgttggcccctggaggccgaggggcatggcgccagcacgtctgagccggtgcccgtgtctgtccgtgtctgtaggctcgggcgacatggacgggttgccgaaggtaaggaggctgcgctcttgccgggggtgggatccggggggggtggcggggagggggcggggcggggagttgcgagccgacggcggccgcccccagagttcccccggcgccgtggccggcctgagcaacgccccgggcaccccgcgggacgacggcgagatggcggccgccgggaccttcctgcacccgttcccgagcgaaagcgtaagcgactgcgtcgactccccccccgcggcggcgtcgggccggaggggctggcgggcaggccccggcggggcggccggggggccagagcaagaccgtgaccgcggcgggccaggtgggggggcggccgcggcatcctttccctctcctcaacctctccccaccccccaccacctcccgctcctatttcaccgtcccgatcccatccgcccccaccccgggacccgcgccccagggcggccttcccatgcatcgcccctcccccgttccctcctgtccccaccccatgtctgcccaggacccagccctgccctgtcccccattgtccctgggggcgggtcccagcctcttccggagctgaactcggcccctgcgcgctgccccctcctctctccgcagtactcgccagggatgaccatgagcgtgtgatggggcggcagccccgggcctctctgcgggcctaggcttctgcccagcgcccctgctcagggcgaggggctgaggtcacacctcgggcacctggactcctggccaatcaaggcttgcccagctgggaggccccacacgaaagactcttaccattttattaaaaacgcaaggacctcagagacgttcttttctgtatggacccttcctgccatttgtattttgtcccagagagaaaggctctttggggggcccctctccccaggacgtcagggggtggggcccataaataaatggaagctggttttggtttttggtagcttgtctcagattccctctttggccttctgccaccacactctccaccctgtggtcttgttccgtccccgcccccatctagccccacctttgagaactgggggcagagcgaggctccaggttctgggctctccctgggagttggggtgatgaccatgggcagaggggatgggactgaagctgggcgctcaagagtcggggaagtagagggaggcagagtcaggtcacaggccccaagaaccccaggtggaaggagggctgagtggcagcgcctttatttgtgggggccttcaaggtagggtcgtggggggcagcggggaggaagagccgagaaactgtgtgaccggggcctcaggtggtgggcattgggggctcctcttgcagatgcccattggcatcaccggtgcagccattggtggcagcgggtaccggtcctttcttgttcaacatagggtaggtggcagccacgggtccaactcgcttgaggctgggccctgggcgctccattttgtgttccaggagcatgtggttctgtggcgggagccccacgcaggccctggagaggtcacacagcttagcagagccagacacccacagggagaaagggggggtatccctgccacctacagccccccaagccctgtgcatagcttagccaggggggtatctgggccccgggcgggaacctggaggctggggtgcacctgaggatgttctcgatgcagctgcgctggcggaaaagcgcattgaccaccgggctgccgggcggcactagtggcgccttgaagaggaagctgagcagggacagcacggggtggaaggtctgcggctcggggtccatgtcagtgcagaagctcacgcgctggcacagctcggtcagcagcgctaggtccagcatgatgggtgcggccagcagcgagtcctgcggggcgggtgggtcaggagatgggggcggtggccaagccctgcctcccatagcagcccctgaagccgcgccgcacctcacacgtgttgtgcagcaccagtgtgttggttccgcccagcatcagctccgaggtatactcatccagcgcgcgcttgctgtcacccacgtacggcacatacttgatgaccacctggagtgcagcaggagtttgcccgggtccctgccacccctcgccgggcaaccccgcgcccgcgcccgcgccccacgcacgcagtggtcaggctcttcgccgggcgtatagagcactgggttgctctgcaccatgtcgtccaccacgttgctcttggacacctccttagagcggaactgcaatggcgccgataggttctccccatcgttgttgcccaggtggttgtaactcacgatggacatggtctgtgggtacaagggaagccccagcagctgcaggccctgcggccccacaagccaggtgctcgcggcccaggcccccttcctgcactcggcagctccctaggcccacgcaccttgaggccggagccaatgaggaagtccacaagcacggacttgactttggtctggcctgacttgaagtcatctccgcccacaaaaacccggtgctgccacgcgagctcaagagctccgggcaccagggtgttctgcggagacccattgaggaaggcacagccctccaggatgctggccacggcgaagagcgtggagggcgacacctccagaccgagctgtgggcaaggcgggcagtcagcacagagctgtgtctgtgactggccctgcctgacccgctccacccgggcgttcgcccacctcaatggtgcgcagcaggttctcggctgtgtcgttgaggcctggaatcacctcacagaagcgctccgtgttcgccgtccacagcactatgactttgtccagccccgcgctagaccggaagtctcggatgtccctgcggatctgctccagctgtgggttggatggtgagggtgtggggaggatggagagggtgtagggaagttggttgtacatactctcggactcacagaggcctgggctactcagttccccgggtgtcaagtgaggcctggattcgcggggtggggcaaaaagagggaaccaagtggcgaagaacaggtggcaggaagcaagggatgcgggatgggacagcacctgctgcgcacgcgagcctgggatgaggttgtccgcgcgcgcgctctggttggccgcgatgaattcggggatgtaaacagaaggccggggccgcagggcctccatgtgcggccacagttgctcctgcagcccccagtccagcaccttcgcgcgccgcatcgcctcggccaggttcagcgacgagatgtcccagcctggggggaccctcacactcggccctgcccggatcctgggcccctccagaccccatctcccatcccgccccaccccggcccagggctccgcccaccatcgaacacgaggtcgttgggcgccaccatgggcagcaccgcgctgaagggtacgaacacctcctggccctcggcgtccaggcccaggctcacggtgcccgcctgagtcagcgagccgtagtagttggcctcctgggggtcagcagacacggcgaggtgacgggtgggagtggtgaaagggccgcgacccggcctgggccccacctagactctcaagccccgccccactttcgggcatttttcagttccaggctcacagccaggacggaagccgctgcccccaggcccctcccctgagacctccggcaccttaagctccgcccctgtaagactcccgaggagtccccgctacctcgcgaaacccttccacggggtccgcctgcagccaggccccgccccctgcaagccctcccgccccacagagcttcgccccctgcaggtccctcgcccactacaggcctccagacccgggcaggtccctcgcccctgcagcccctcgccccgcggaaccccaccccctacagcccccctggtcccgcagagccccgccccctgcaggctcccgcccccgcccgcaaggactcccaccaagcctccctacccaccacgcccctcccgcccccaccttgcggccgctgcgcgtgggccaggacaaacgcagtcgattggccagcaccgcggcggtgagtgtggagccgttgttcccgccccagccgacaagcatgaccccgagccggggcacctgccgggcggtccggaaggtgaagcgcgtggacgtggggtgcacctgaagacaggccgcgcagtgaatcccgggtcccgtgcccttctccccgagccgccccgctctccccagcacgcctccttcctcagccccctggtccaccttgagaacgccaccctcgcggctgacgcgcgtcgtccggtactcgtattgcgcctcgatggcctcggggccgtagaccacgtccgggctctcgacgaagaactgggcggcggcctccatcgcggcgggctgggggcccggggtgagcagggggtcagcggggactctaagcggccggggccaagccagcctgggtccccacggaggccgtccctgccccgaaccgcactcaccggcgcagagtcgactcaggcagcggcggcggacagcgcgggctctcgggcgcgcgacctccggagaaaagcgctgcggcccctcccccgccccgcccccttccccgcctctcccgcgctgggagggaggggcccaacgtctggagacccggttcgaggcccgacaacccagagccaccgtggccatcgggtccccgcctggcggaagtggccaggcgtccacgagcgcggcgcgtataggttcacctcgctcgctccgcagcccccaggggctcatggctgcctatcccccctttacaagaggacaatgaggctacacatgagcccagccacaagccagggggtggagctgggcagggaagctgggcctccgggggggtaggtagggggtctgggtcagagacactgcaggggaaacaggcagaggaccagaactccaaagccagaatctcctcggagccacactgccacctactcccccttcgtgggcagcagcacctaccaggcagtcccatcccctggctccccatgtccgcccccatccatctcgggggacaaagtcactctgtccccacggggctcacaaggatggggcctgtttggcctgtttccccacctgcagcaggagggcttggcaggagtgggccggagcgggaggctgttcgctggaaaggggaggggacgcacaggcgggcagggccgaggcaggggaggaatgaggcctgcactgcagggcgcccccctcatgcgcgctgataagggagcgtgggaacccagcgggcaggccggggcagctcccccaggaactttccaaaacaagcgcctggaggccggaaagtttccaccactggagctggcccaaaaggtggatagttgggaacgtttgcaagagacagggcctgaccttggaggatgagggcttaagactctgggtccaggcctcaccctgaaggggccccagtctgagggagttggaagtggactgggacacccccgccccagtgggtgggaactcacaggcagggcccctgcaagacaggctccccagatgagggggctgctggcaagggttttgagacatgaagaggagttcactgaaagaaaactacaggccaagccacctgagccacccagacagggcagatgaaaaattggctacgtgggaggcagtttggggtcttgggcagaccctgagggctggggatagggagtgtgaaagagtatttggtgtttgttcctggttcttggttagacattgagctcaatcaccagtggccaacgatttaatcaatcacatatatgcaaatgagacagttggggctcagaacacagaaactcccctcagcctcaagttatggggccttggcctgccccgcgctttgagcagggcatcggaaagctcagaatcgagtctctccgaccttctcctgccctcctgcctctagcccctttctcccctggaaaccatagaaaccagaattcctcttccccaaggcaggtcagagacactggagcccttctccccttaaaacaaaaaaaaagccacaaagccggcaaaggtcactctctgcctgctcccttgaagaccctcattccgggagggtcctgcccataccctggaggaaggaatgctacccagagtctaggaagtctgggcaggctggcccccctcccccacccagtctgctccctttaagatctacagtgtttcaacacattgatacacattcttcatagaacctaagccgaaaaataggcagtcagccaggcacggtggctcatgcctgtaatcctagcactttgggaggtcaaagcgggcgcatcgcttgagcccaggagtttgagaccagcctgggcaacacggggaaaccccgtctcaatacaaacaaacaaacaaaaaatagccgggcttggtggcgcacacctgtagtccagctgcgtgggaggctgaggtgggaggatcacctaagctcaggaggtgtaggctgcagtgagccatgattgtaccactgcactccagcctgggcaacagagtaataccctgtctcaaaaaaaaaatggggtttaggggaaaatatggaggggctgggagggtggcatgcctggaaaaggcatggaagcttcacggcccgcccataccttgccctgtgcgcctcctccatttggctgtgagcattttccggagttctgtgagctgttccagcaattatcaaacctgaagtggggtcatgggaactcgcaatttattagcctgcttgccagaagtataggtggcatctgacacaggtgcagccctgtgggactgacccccataacttgtggagtccgataccatctctgggaatggaactgttggacatcctgtaggtactggaggatcagagaatcggggagtttgtgcctcgaggcgacacgtgattcaggaacctgtgtagttgagagacatgaggaaggtcccaagacccagccccggggagcctgtgttcacagggccacctgtagagggtgccggaggatgggagctggcacagggcagctggagggaatcggcatagaggctgggctgcttccactcccagcagttgacaaggccgaaggagggggtttggcccctacagtcaggcctgggtgtgctgaagtcggtggtgagatgcactgttattccccagcaaagtgtgggctccctgaaggcagggatgaggctgagtcactgctgtgttgcagagcccaggtggagcttggtacaggagggggctgcaggaacaggggtgcccgttgaaagaggacaattggggcccctggcaggtggcaggagagggtttaacagctctgagcccctctctaccagggtgcccaggtcatgagggtgggaaggctctcctgaatatccggggcactagactgatggcatccatggctcaggaaggtcaggggactgactgtggcctctgcaggctgcgggggtgatggccagagtattgctgggcagttggcttagggctggcgttggagggccgggggaggcaggaccgtgagctgcaggaggttggtgttggccctgggatgttgggacagagatgttatcctgggagaacagcgtggccaggctatgctgggagcagggtacacgctgccccactgggctgcatgacttcccctcccgcgcccctcagattcctgggtggccttagaacttgggccaaggccacggacgggcagggaggccaggccccccccacagctgcaggcccaggacctttgcccacggtcctattcttcggtgttatcgcttactaaatgcaccccttcttgtccttggctggcaggttgagtgttatgttctccatggcccctggctcgttccacctgcaccaccgccgctcccgtcaggccttttccccatccccactagtggcacaggggatgcccctgccccagtgtgggaagaacaggtaatattaccgttacctgctgctgctttcatcagagggagacagtcacagctggtttcccccacccccagccccactcctgtagcctttggtgccacagggggccaaggaatcccaatgctgggttcagcccaccctatccacaccagagggtactgctgtgctcacacacctgctatggctccctatccctccgccctgacccagcctgcccccacccccgcgctccccgtcacctacagggccctctgatttggtcctttctcaggcaacggctcaggtaggctgcaaactctgccttcttatctggtcccagccagagcccctgaacaaccctttctcatcattatggcggccccaggtcacatcacctcctgatgccagcccacccccaaccacaggacagggacagccaccacagaaaccaggctgtgacacacccacacactacacacacacccacaccccaacacacaccacacacccaacacacacacccccaacacacaccacaccctcacaccacacacacacctacacaccccaacacacaccacacaccacccaacacacaccacaccctcacaccccaacacacaccacacatccggtcaacacacaccaacacacaccacacccacaccaacacaccccaacacacaccacacccacacaccccaacacacacccaccctcaacacatccccaacacaccacacacaccccacaccacacaccccaacacacaccacaccctcataccacacacccagatacaccacatccacacaccacaccccaacacacacccacatcccaacacataccacatcccaacaaacaccacatcctcaccacacacatccccaacacacaccacacaccccacaccccaacacacaccacacacaacacacccacacatacaacacacacaccctaacacatcacacacactacacacccacacacaacatccaacacacaccgacacagatatactacacacccacacaccccaacacacaccacacacacatacacaccatacaccacacacacagatacaccaacacccacacaccacacacaccagccaggcagcctgggctgccaggttcagttcagtgaaatttattggagaatgaaaaaagtcagcattcacctgtttagtgtacaaaaaggacactagatcttttaagaaaatatcaggaaactgaagacgcagatagatgcctttcaattgtaacattttggcaaaagtggaaagttcttgtaaacaccaaccccatggctcaaaatagtttttctccacagtacaacattaaaagaaaaaaaaatagtatcaataagttagaccatatttaatcagctagaactttgtccaccaacccccaaaacacaaaacttttcttagcttcataattccttaaaaggagaacaaataaacaacaaaaacaacaacaacaacaaaaaggcaaattcaactgacagccccttggactggttcccagggcagaggggcgggcagtcccgggctgggacctcctgaaatcatcccacctcaccggtgtctgcagggctgcctgcgggcgacacagcaaggtccagctgactctggaggcctcctggagcctgctcggcccttccccggcccggcccggcccaaagagaaaaacaacaacagctattgaaacatgaaggatcagtttcctcggagctctgggaacccgggggtcccaaaggagagagactctcgggcaggggtgggatacactgtgggccctccacagtcagctctttggaagctgtcaggaggcacccctccaccccccagtttagaaaaatagacatctgtatttttgcatttctgttctccctgcctgactgctgatggcagcagtgacccccatgtgatccctgggccctgagtcacagccgccatccaccccccaccacctttccaagtcatggcttcattcagccctaaatgggaacacacgcctcagaccccaccatgccctggggggtccccacatacgcacactcacacacccacacttgcgtggccccccgatgctttgggggacactagactaggcacagcaacagagcagcaattggggtgtctgcagagcctgcacccccagagcaggcagacccatcctcctggctccccagctctgcccatgggtccctggggcctccctgaccccatggcgcccagccctccatcagcccctccctgagtgcaaaccttggcggtggctctgctaagacgaccccaggacccacaagtggacagagggacggagggaggccagcagcatcgagaccacaaggtctcaacagtgtggaatgagcagcagcagcaacaaatgggaaaccgaggacatcgcaaagaaaagtctgacgccgctgcggccgagtctcaacttggagcacagaaacacagtggcccccgacagctgagggcctgaaatagcagggcaggcctgggggcgctgaaagccctctgcccccttggctctgagcagctgtctgggggcaccagctggagttctcaaaatagccacctgggccaccctgtttgcttgctggagcagagaccctgcccaaggaggagaggctggggaaaggggtgcctaaacgtagagccagagaccagcagaggccacctgcccattccccacgccctcagaacgcagctgcacctttcgacgacctctgtaatactgcaggcaggacccagggcagcggctagaccctgggtgtccgaggagagggaggcacaggtttagaaaaaagattttgcttctcttttgtacaaaaatagactcaagtctcattagcagtagctaaaagtggctgtctttgtataaaactagaaaaggcaggcgcgccaccccaagggcctaggagtcttctggcgagacaggaggctgaaccccggaggctgcagccagggaggaggcagtgggcttcctggggagcccatcataagcagggactgctcaggaagcgcagggagggccgaggtgggcttgcagccacccgccagggccagacgtctgcaggggctgccctgaaagccggcggtgctggctcagatgagcatcttcctcgggtttatttttttaaataaatcctctctcaccgccttttgctcccccgaccctcccagatccccgccatcggggagggcggctagggccaagcctgcagctgccgctggtcgtactcggcgatgagcctcttgatgtgggccagcttgctgtgcaggtactcgcagcggtgcttctcctggctgtagttggtgttggtctgtgggacagcacagtcatgctcaggacagagccgccctgggtgctgctccccgctgtaagcaggccagtgtcccccccaaaccaaaaacctgggcttggtgcccagcaaggagggttgtggtccaagggcagagtgggagttggtcccccgcacctccacagcttgtgtggctgggccaggatgccacagctgaagacttagctgggggtggtggggcaactttggcctcagactcaaaggctcttcccccacaccttggaagtagcgggcagggaggctgccccgggcccaccctcctccctccagctcccatggctcacttggagcccaccccaacacaagagacactcacctttttgatttttcgatattcctgcaaaatctgccctcgagtagtctagaagaaaaacaaaattttgagaaaacagaatgtgtccccgcctacaggaaacccaaattgagtggtcccaggtgctctgagaagggggcatgggagggtggggcagcctcaaggacaaggccaagtaacaccccaggggcccacagcggctgtagctccggagtgggtggggcatgagggaaaggctgccgggtcccctggaggcaatagcaggtggggcactgctgttgtgggggcgtggcaggacaaggaagtatccatgtcgtgggggggtggggagggggtgggggggtgcagcaaagagggagggaaggggaaggagagatgccccaagaacccgtggctcgcagcccctagaaccccatcatgagtcgtcgtctttggaaggcaaaggggccttggccaggagagaccccggcatctgattaatcagggcccagccctgtagtcaggtcaccagttccgaaaggtggcaggtggggcggctacgtccaaggctaggctaagggtggagactctctgtatacacagggcagctgaatgagctgtgagctcaagccaggggaccacaggagtcctgattcccaggaccacagggacctgtcacctccccctgctatagttgtggcagcatggatgggccccagggtgctggacagagctcagctgcggagtctcctgagggtttggcacaggtaccaagagccctgtgtcctaggctgtgagaggaccccaggcgctcaaacatgtggggatccatgtaccccggctcgcccccatccaaggaggtgggtcacagctgtccccactgcaaaggaggctgacaagctgggctgccttcaaggactcccacaacaggaccccagggccgggccagaaccatggggttgctgcatggagtgcaccagggggagaagcgctgcctggggaagggccagactctggggccaccaagctcgtggtggcgatggtgcgcgcccaagtgggccctggctcccgccagagccagggcacagtaggcagcgggggggctctacctcatactcctcggagccctgggagagctgccggagctgggcgtcgagctgggtgaaccgccgcgtgatgcgctcaatgcgggcgtgcaggtcgcggtactcgctgtactcggcattgaagtcgttcttgtagctctggcgctgctccgaagaggagatggctgcgtacttcctgaaacaggagagaggggccactgagtggaggctggaaggacccagccccacccaggaagtggccatcctggctccaccggcggcctggcctctcgggtgattccctggattatgagggggcctggcccagaagaggctgctatgtttggaattcacatactcagacttgcagtggcttctacctctgataacctgcagtgctgggggagggggtctgaacccagaaaagggaggcctggcctgcagggcccagacaaacactcacagcaagtagtcaggcgtctccgacgtggacgtgggaacactggaaacgctgcaggttccgtttaaacctacgagagcaaacacatacctcctgagtctgcgcccatggcaccggtcggcaggaagcacgccaggatggggacatgcatgaaaactgtacactttgctgctggagggacatagagggatagcagaggggatgactgtgtggcaggtgcaagggctgagcccctcgcacctggcaactgtgggctgctggacctgggcgtgccctccaggtggtgagcagagctcagcgtgcacctgcgtgtccagggcaaagccctgcaggacacagagcacccaggcatcaccacagtcacattcttggcaaacagcggacaggtcagggaactgcagggccaaagcctgcacaaccggtcagagcttcccccaggccaggcccttgctgcctccactgactgcatgtcaaaggtcactaagctgaaaacaaatgacccctggcttgacctgagtctctggggcatcccagtctctggccagacaggacaaagacaagatggccagcagggcctgcatctcttgctgctgacaaagttccacgcccttggtctgtgccccacccagatcatcccgtcctttccactagacactgaattgcacgctccacaaggcagctccaggacagggccagccagaggagcccatgggccaccccaatcggccatccatgagcaaagtgtccatgatgacgctcagcccttcgccccttcaggggcctgcccaaagcagcacagctgatggctagatggcaccccaggcagctgtcctgctcctgagccatgtggtggggtgccccggccacataagacaacacccctgagggtctggaaatcagggaggggaggggcaggaagactgaagtgcgcgtcgcctaagaccacaactacaatttagtgcgttttctagaccttcttgcagtggctttctttccgatacagaaatgattttatcaatttcagatgtatcctcaatacactttttttttttttttagagacagggtcttgctctgccacccaggctggagttgcaatggtgcgatcatggctcactacaaccttgaactcctgggctcaagtgatcctcttgcctcagcctcccaagtaggtgagactacaggcatatgccaccatgcccagctaattacaaaatttttttgtagagatggggtctcactgtgttgcccaggctggtctgaaactcctgacctcaagcaatcctcctgaactggcctttcaaagcgttgggattaaaggcatgaaccaccacacctggcgaattttttttttttttttttactttttagtagagatgaggaggcttgcctatatcgcctaggctggtcttgaactcctggacttaagtgatcctcttgacttggcctctcaacatgctgggattataggcggaaccactgtgcctggccctagtgcacattttcaggggccctctgcactatcccctgagagagcaggagtctgcgatctccagtttgctgagccctctctctcagtgtaacacacctgggctgaccacagcagcttctctgctgccaaattcccaaaagtggacgaagctcactccccacaaagtttctaacactccccactttgggccagacactgtcttccatatcaccaccacccccacctgggttgtctttaagaggctgtggccttcccagggacgcaactcaatgggcatgtattgaatgggtctgaccctggtccgggccagaaggaagtgagaggcaaggcgcagctgcgaaggccaagcccatgctcccgccacgcagtggactccgtgggtattctacaacagataactgccatgtgtcaggctggtcaacattacctcatttgacatgccccaagatcttcaccagctaggatgacaaacggggaaatcaaggctcagggtcagctcaacctggtaccagtgggaccttcaaagtccagcccttggcaaacctcagcggcccccgactcctactcaagctctggctgtgtggggccggccaagctggtccctgcttcggggccccggagaacacccccacagcagctcctctccccatctctccccttcacagcccacgtctctctacttgcttgtcctgggcacgggcacaggacagctaagacatgccctgcacaagtaccaccttcaggactctggtaacatggaccaccagcaccaggctcagcttctggtgcctccactgtccttttcttggtgcttgggacatctacccctgctttgcattttctcacctgtggtagagatgacagcccctgggccggggatgaactgcctaggggccaacacgcaccaggccagacaggaaaccaccttgagtccccaggcctgtcttggcacctaggcactgggcatccaaggaagggacacagcccagagtggtctgtggaccctggagccgggccaagggtctcaaatggcagatcctgccatttgatcgtggcccaggtctggctgtggggtgtgggtgtgtcctgggaatcaggagtcctgccctgagcatggccctggtcagagaggctgcccagggagtaaggccaccttctccccgtcggcccccacatgcagtcccacgggaggtgggaagcccagcacgaggcagggctgacccaaccccgaaagtcttccttcctatccagtaagacccagccacagttgtgaggacctgctctccagccacagcaggggacggggcatggccctctgagcaacgcaaagctataatgaaagaagggctcccaccctcatcccaggaatcccctgactcagcctcctccccagagacacaacccaaaagcacagcaggtgacaccacctgggctgccctgggccagctggcgccgagagcgaagtggccatctgcaactggccgccatcgccacatgggaccactgcagcccctgtcgcacatggtggtggaacagccgctgcacgctggccactgcttctgctggttcctataaatgaacagctgcgcaggctcatggccacggtgctaggcgggtgctactgctgctcagtttaggtgcctgggctgtggtctcggagccgcccaggtctcctggctccccaatcccagcctgccaggccctgtccccacagcagaaacctacagtccacaacagtcgcacggtgcctacagaggtccaggtgctatccctctcccaccaggatctgcccatctgcacctgtgctgcctctccctgaatagggctggcttgcctgggcccccactgtcttccctgaaccccagcagacctcagcatggccctggctcctggggcttccctgcagtcagagctggggcctgggccccattcctctctgcatgttagccccttctgcggcctcagttccccacaaggctctgggcctccggcccccagtgctggcctggcacattgactgcaagtggcaccgggcactccagacaggcagggagaggaccaggtgcaggaacatagggtgccaggtgccaggcacacagggcaaatctgatggggcctggggcaacagggtcccctcccctggcttctacagcttgagccccctcgacaccccatgagggtgaggcgggtgtggggccagtacttagagccccggcaacgccctcctgcctgggcacctacctggggtgtctgctggggctccgggggtggcatgggtggcaggtgcacagtctggaagctgggcccggggcttgtcctcagccgccctctccttgtctttgtgcttcttggacttcttcttgggcttgctgcgcgaggggctgccgtgtggcctgctgggctgggcacagtccgtcagcaggggcaggccgaggcgcacagtgggggctggggcagccgcctctccgtgctcacagtctcggccgctgtggcccaggtcattgctgacatcggccagggggtcgtgggccctcgggggctccagccgcgggggcaggtgagtgctggagctgagggtgtccgtgctggctggtgggcccggggtgggcagcaaggcctcacggccattgggcacgcccagcttcccgttgacggcaggctgagctctctgagtgaagtgcgatatccggggtttcttgttggctagggggtcgatgaaatcaggaggctgcagccgcttctggagaggagcagagatcattttagaggggagcacagagtggctgagcagcaacaggcaatcccctggcctggctagaaaacccaacgccgcctgcaaggcccacgctggccacatgggggcgcccgagcaccaagtcaggtcccaggtgccgctcagggtggcctcagctggggcccatcagcctgctgggatcgatgcagggggagggcagggcccagtgtgtgagcgggccacccctggggactggtctaaagcgctgctgtgctcagcatgcttccccagtgataactgtgacacaggagcaggaagcccagggttgagcccacatcagggagccgccccccgtcccaggttccgcactgtgacactggggtgctgcggccacactggcaggaatctgcccccaaccccaacccgacagcttcccccttggtccctgggcggagggaggcggctcaacttggagcagctcatgctccaaagagctggtgaggaaggtgacaagggttactgatgcagcacagagtgccctgcaggtgcttgggacagtcaccccaggcatgcctcacttacctgtgggggcgaggccgagcgcccacgctcgcctggggggctggaggcagcagggtctccaaggaggctgccagtgctctgtggctggcacagcttcctgcgaaggagaggcagggctaggtcagaaggtgctgagggggcctaggggccccaggcctgtatccacatgggggcccggtggagatgcctcaaggaagggacccccctcctcccaaatccagagcagggccaaggggtcacaggagcctgggcctgaggccatcctgcccccgacttcacccaaaggaggacttccccactcactgtccccctgagcccagaggaggatcactttgtgtaggtgcctgctaccggagagaccagggacacacgctagggtgctggaccctgcttttaaagacagctgttcatcctgttcagaacgctcactgcagaaactgtccaaaatgcagaagagaacggagggccctggcctaggatgagacagccttcctggaagcccaggtcacagcaggatctggagggcggcagagtggccaccagcttgactaggtgatgcagctggggaagaagggaagaaacaccccagtgcatgccccttctcccgctccatgtgatctgggcaagtggaatcccccacccccgccagcaaccctgcagcttatgggtatcctctctgacccaactgttcaattcccgggggctgtgccatctcagggcagcctagcgcccctccaggccctgcagagagacttaagtccagggccgtggccattctgccagccagtgacacccagagcccatctccctaacaaatgggctaggctacagaccactgcaggtgtcacttccctggtggcctgagaggagagccatgtggacataaacagaactcccagttaaagacagaaaactgagaacaggcatttgcatccactggacaggcaaggcagagacaaaaggaggagtgaagacaccggaaagcatagcagaagcatgagtggtgactgctgcaggatccagagaatccagggcccagagcaagaggcaccacgacctcaggggacaacagactgctgcagggccatcccccacagctctactccagatcctcatcactgctggtggggctgcaggacagtgagcccagggctgtcaggcagcaaagaggctcgggccactcctccaggcagttgggaagttacctgggccacagctggacaacaggatggccagatgtgtggcctcaggagaagaagaaacagggcccaggactagggcacatcgggattcagaggccccaagctgtgcagtgtccccaacggctgcactgcagcttccaggcaacaaacgtcagacctcaaaacagaggaacacgaaaatacatttgaaaagagactccacagggagatgaaaacgttaaaaaataaatcaacaggccgggcgcccatggctcacgcctgtaatcccagcactttgggaggccaaggcaggcggatcacctaaggtcaggagttcgggaccagtctggccaacatggtgaaaccccgtctctcctaaacgtacaaaaaaattagccgggcatggtggtgggcacctgtaacctcaattacttgggaggctgaagcaggagaatcacttgaacccgggaggcggaggttgcagtgagcagagatcatgccattgcactccagtctgggcaacaagaccgagactccgtctcaaaaacataaaataaataaataaaaaatgccagttttcgtgtccttggaaaaacaaaagctctgaatagacgtttcttcaaagaagctatacaaatggctaaaagcacataacaagatgctcaatgccatgtgtcatcagggaaatgcaaatcaaaacaacgagacactggctactctgggcacactgcctatgggttagccctgccctgcaaggagcaataatgaacaaacaaacccaccaaacaaaaaacaaacaacgagataccacttcacacacacccagggatgactggaataaaaaaaacagaaaataggttgggcgcagtggctcacgcctctaatcccagtcacagctcactgcagcctggatctcctgtgctcaagtgatcctcccacctcagcctctagggtagctgggatcacaagagcacaacaccatgcctggctaattttttcattttttgtagagatgagggtctcactatgttgcccaggcttgtctagaacttgagcccaggcttgggctcaagcaatcctcccacctaagcctcccaaagtgctgacattataggcatgagccaccacgcccggtcctgattcaacattcctcacagctacaagtttccacagattacatgtcagccacacagcgtataattccattgatctgaaatgtccacaacaggcaaatcaatagagacagaaagcagattagtagttaccaggggctgggagcatgggagggaatggggagaatgactcctgatggggatagggtttccttttggggaaatgaaaattttctggaactagacagaggtggtggctgcacaatattatgaacgtacaaaatgttactgagctgctcactttaaatggatgacttgtgttacatgaactgtatctgaataaagctgttattctttaaaaaacatccttagaggccgggcccgatggctcacgcctgtaatcccagcactttgggaggccgaggcaggtggatcacgaggtcaggagatcgagaccatcctggctaacacggtgaaacctcatctctactaaaaatacaaaaaattagccgggcatggtggcgggcgcctgtagtcccagctactcgcgaggctgaggcaggagaatggtgtcaacccaggaggcggagctagcagtgagccgagatcgcgccactgcactccagcctgggtgacgagcaagactccgtctcaaaataaataaagaaataaataaaataaacatccttagagtaggttaaaaatgacatcctgggctgggcataatggctcatgcctgtaatcccagtactttgggaggctgagatgggcagattacctgaggttgggagttcccgaccagcctggcctgcatggtgaaaccctgtctctacttaaaaatacaaaattagccggtcgtggtggcaggcgcctgtaatcccagctactcgggaagctgaggtaggcgaatcacttgaacctgggaggcagatgttgcagtgagcagagattgcgccactgcactccagcctgggcaacagagtgagactcagtctcaaaaaaaaaaaaaaaaaaggcatcctggctgggcacggtggctcacacctgtaaacccagcactttggaaggctgaggcccttgaggtcaggagtttgagacaagcctggccaacatggtgaaaccccagatctactaaaaatacaaaaaattagccgggcatggtggtgcatgcctgtaatcccagctactcaggaggctgaggcaggagaattgcttgaaccggggaggcagaggttgcagtgagccaagattgcgccactgcactccaggttgggcgatagggtgagagtccctctccaaaaaaaaaaaaaaagaaagaaagaaagaaaaagacatcctttccattaaataagaacatgatgagttaggccaggcacagtggatcacgcctgtaatcccagcactttgggaggccgaggcgggtggatcatgaggtcaggagttccagaccagcctggccaagatggtgaaaccccatctctactaaaaatacaaaaattagccaggcgtggtggcgggcacctgtaatcccagctactcgggaagctgaggcacagaattgcttgaacccaggaggcggaggttgcagtgagccgagatcatgccactgcactccagcctgcgtgacagagcaagactctgtctcaggaaaaaaaaaaaaaaaagaacatgctcctacgaaaacgcaatggggaagactcttagaaactagaaataataggccttgcatggtggctcacatgtgtaatcccagtgctttgggtggctgaggcaggcagatcacttgaggtcaggagttcaagaccagtctggagaacatggtgaaaccccatctctttgcctaggcaacagagcaacactctgtctcaagaaaaaaaaagaaactacaaataatagtaaattaagagacaggatgagaaatgtcaaagaagtctcctaaaaggagaataaaaaagagcaagagatgaaaaccagctgggcgcggtggctcacgcctgtaatcccagcactttgggaggctgaggtgggcggatcacctgagatccggagtttgagaccagcctgaccaacatggagaaaccccatctctactaaaaatacaaaattagccgggcatggtgcgcatgcctgtaatcccagctactctggatgctgaggcaggagaatggcttgaacccaggagacggacgttgctgtgagccgagatcgcgccattgcactccagcctgggcaacaagagcaaaactccatcacaaaaaaaaaaaaaagagatgaaaaccaggaagaggaggacagactctagcagcctgccaagagcagtttgaggtggtgtgcagtaggataggcctttccactaccacacacaggacagaaggacggatagacggataaggcaagttttcagcctgcgggggccgtggtgcccaccatcccagagtaggtacctggccagcccctggctctgtggaccagcacagggttggggtgggaagcctctgaccttcaacgtggagggaaagcatcttggactctacaagtctagatgtgatcaaccgccggctcagcaggaccatcgtctgggcatgaagatgtggccagcagtcctcctggagccctgtcctcagagaggtgctccaggagctgtgctcccttggcaccagggaggagcaggaaggaggagtatatagactctggcatggggctcacaggagaggggagtggctcaggttggaggtaagggcaccaggcagtgtgtggcttgggcagaggaatcaggaactcttggggggacctgcaggacccctgacccatggacagtgatgagaggagatttggataccagggacagatcgggtttggacatcatgaacaaagagaacatgagtggagaaaccaccccccaaagccacatgtggtgccagctcagctggggaggctcctgcagtgacttgggcccccacatcccatctgtctcacggcctgcactaggctaacggcctgcactgggctagcccagctggtaacaaatactccaaggccctgctttgatatacacgaagccatggtgtcaaaaactgctataaatggggctttcttagggatggggtgctaaataggaaaaaaaaaaaaaaacagctatgcagaggggcaccgcaggtcaccttctatgtggttatggcccagggacatcaaccctgccccctgcacgctagtggaagcttgtgaaggcagtgctgatccccatgccggcccagagtgaaagcagagtgccaaggggctggcatgagcccagcaagctcactcagcagacggaacatgagccttgaatcaggggagctggaggcggctctggagcctgcatcccggggaagctccccgacgccccagaggtgcagcccagccttctccacctcactccactagctctgggcagttctccttccagtgccctaagggtctgaggaacccagggggccaagggagaggacacagggtatgaggatgggggcgggtcttctgccaagactgtgccctccgccagcctgccgccaagccagggcagtgccccgcaggcccctgacctgcacacccagggtggacaggcaggcactaccctctcaggggagcagagtggacccccaacttcattctgctttccagaggcaattactgctttaaacagctgaacttccaaaaaacaactacaaactcataaatacctccgagtccctgagaaatcacttacggactaattagcagattgacctgcttcacagcccgagctcccctagctggcagcagtggagaaggaagtcattagccgcctgcctccttaaccactgctcccctgagctgctgccacttctgaccctgggtcccaattagcctgaggggatgcatttaattaacgctgcttaatgacgcctgccctgccgggagtgtcgtttggccttatttctctctacttcaggttcttgagaggctcttttcaaaaagtcagtgaacttcccaggccctgtggggatgcccaggttgtggagggaagcatgaagggaagttggggacagctgaggagggtctcagcagactgaggccttttgtctgaagattccaaggtcggggccagtgactcacacctccgtcccactctgtgagcgtggccttcccccaccacgggacaccctggggcaccacgtgggcagtagggaggatggccagagaggcctacttggacccttccatcctgctcccaagccctgtggccttcaggaccacacaagaccaccccagcatcctctgggtaagctctggctgccttcatgcgggtggggacatgctgggggatgggaggcggcattaccggacgagcacccgcttcagcagctgctggtccccctccgagtagccaggccagtccttctgcacatccttgtacatgcagtcctgcagtgtacacgtgccgtccttagcactcatgttggccacctgcaagacagagccagccatcactttgtgggaatcctgagagagacgggggactagagaaaaaagatctgatagtgggtttgggagggtgtgcagagacagtgggagacagacagagacagaggagaggaaagaggatggcccactaccgatccgtgatgtctcccacccccagttcccccgcacacaatcctcagggtgcagaagggataatgagggtcatgaaggcaggtccagactcaactgtcttagaggtgctggggccaggctggctccaaaaaggggagggctaccacctgcagtactgagaccccatcacctgccccctggcccctctagcctgctttttttccttttttgatacaagatcttagctcactatagcctagacctcctgtgctcaagcgaccctcccacgtcagcctcccaggtaggtggggccacaggtgtgcaccactatactccagctaattttttttaagagatgggatctcgctatgttgtccaggcttgtcttgaacccctgggctcaagcgatcctctgatctcagcctcccaatgtgctgggattccagccaccacacctggctcctatttcttccaggctggagtgcagtggtgtgatcaaggttcactgtagctgcaaactcctgggctcaagcgatcctcttgcctcagtctcccaagtaggtgggctataagcatgcactatcatacccagctaattttttgtatagataggatctcagtattttgcataggctggtctcgagctcctggcctcaaggatcctcccacctcagcctcccaaagtgctggaaacaggcgtgagccaccgcgctgggctccaccccatttctgatcacaactcccagggaagagtcagccacggctggggatgctgggtgaggggtacctctggggccacgtctgagcccaccttccctacaaccagcctgccttgctgttgccggttgaccaaagctaagttcgtctcccagactgctaacaaagatggattcagaacgtctgccttagagggatctgaggaagctccaggtcactgccctgagtgggtgctgcgtgctggcctacagggcactctggtctccatcttgctgcaggcatagcagtcactgttttctgctgcatctgacatggctctgcgtcacagcgtatcccatggggagcattttttttttttttttgagatggagtctcgctcagttgcccaggctagagtgcaatggcgctatcttggctcactgcaagctccgcctcccgggttcacgccattctccagcctcagcctctggagtagctgggactacaggcacccgccaccacgcccggctaatttttttgtgtgtgtatttttagtagagatggggtttcaccatgttagccaggatggtctcgatctcctgacctcgtaatccacttgcctcggcctcccaaagtgctgggattacaggcgtgagccaccgcgcccggcccatggggagcatttttaacagttgagtaatatcccacccccaaactgctgccagtttctctgtagcataaacagacattactgtgtgcagtttttttcaggttggcaacagtttccttcgacgggattcccagaagccagattagtaggtcaaaggctgaatatttttatggctcatgacaggctttgctaaatattactcagccgtcaacacccctccccttgaaggataggcttgcgggtttccctggggctcagccagtcctagaggtggacaccttccatctctgctctagatttttccacagagggagggccaagcacctttgaggcatgcagttttgtcactgccattcctcagcatgtctgagggcctgtgaggggctggaaatgaccagtctgggtgaggcacatccccctcctcttctacaagccaacagtgtcctgctgacccccacagctgcttggggggaagcagctgcataatgaatatagaagcaagaagcagacgagctgtccaggggaagtcacagtggcacaggaagggacaatctgcctgcagatgctggccaggcctgctcccaggaggcactgaaccaaagtcacctggagaagccaggcaccagcacagacacctcctggccaggccaatgcaggtcccacatctgatgactccatcgagctcccttcagcaactcctgctggcaccatgccagccctagccttgggagcaggatgggggtggacgagggccaggctgacatcctcccaaggaatgtggaacagggtcccaccagccgcgcacccgagagggacgcctatgaggagctccgtaaacatggaagaacgtcctttatacagctgctatcccggcatgccacagcatgtgctttttgctgcaggcatcacctgtgttcctgaggtgctggatgtgaccccgaacatcccacttccatcatcctaaaaggtgcaagaggctcagccatgtctcttcctccaccacagcagcgatccgaggagacccatcctcagttcacctcaaggctgcatctgcatagcctggctaatgttctgaagccagtgcgagtcactccccttcccagggaccccaggaagccaaggtggagcctcaggaacctccatgggtgaggggggtggaaggcagtcagggccatcgcacctgctccaatgcccggggtgtttctcaagagcaggctccactcgccagcaccacattccagatggcctagcctccaaccccagggaggggcactgcaggtcacagatggaagcctgatggtctgagacgtgaagcccctcacccggaggcgcaggtggagggcggcaggcagctgattcacactgaggcctgccaggctctgccaggcacgtgtagattccttccccaggccttgagtccacaaatcgtctgcaactgaagcctgaatccactgtgccaggccccacggcccgtgtgtcagcagacagtgaaggagggcctgggctccatgctgagtccacctctcaaccctggacagtcggggccatgcccagaaacgcatccatggccccctaagcttgttctaatccaggaggccctggctctcaggcaggttctgaacctgtgagagaccccaggaagggctcttccttgccagtcccaatcccagtctccatgctctggcccatcccacccgcacaagaccatctgcggagaccactggtaaagacaagacatcggggcggcacccacctgctggaggaggccatccagcgcgtccttgtccgcctgcgtcaggccgtccttctgcagtcgcagcagcagctcagccttgcggtagggccgtagtgccaggaggtgcagcactcggtcacggaagggcctctgggacaccccgctgcccccactcacggcactggcaccactcttcctgatggcactcgccaagttgatgggggttgcccgcttccgggagggcaccgcgtctgttgcacctggggctggtttccgaaactgaaccttcttgcctgcaacaagaatccaagctttagggaacagagagggcgctgccgtgtcctaagccagtgctgctgaccaggtgcccagaggtttgagactatagacagtgctggtgggaggcaccacaccaaccacagcaaaagccagcttgctccttggggaccctgggcgaccaagagcgccacctgctgcccaaggcaggcacctgcagggcacccagcctcagaagtgggaggtgcaggcggcagaactgtgttagagccttacttacttcatcacaggcaacctaaatcctggacagcaaaatcacctgatcactctcactctggtgggcagtgtgtgtgtgtgtgtgtgtgtgtgtgtgtgtgtgtgtgtgtatgtaatcacctgatcactctggtgggcagtatgtgtgtgtgagaaatcacctgatcactctggtgggcaatgtgtgtgtgcgtgtatgaaatcacctgatcactctagtgggctgtgtgtgtgtgtgtgtgtgtgtgtgtgtttgggcggggggcggggggggaaggattgttttgttttttgagacaggatcctgctctgtcacccaggctggagtgtaatacaatcatggctcattgcagccccaaacttctgggctcaagcgatcctcccacctcagcctctggagtagctgggaccacaggtgtgcaccaccatgcctggctaatttatattatttgtagagatggggtctcactatgctgcccagactggtctcaaactcatgggcccaaaggaccctcccacctcagctttccaaagtgctggtattataaaccagagccatcctgcccaacctgaggcaggggctgtttgtaaacccttctgatgttaaactgggggtccctgaactgcaagaggcagtcactcccaagcctgcacttcagagtcctatgctggccccatgtggctgccatttttgtttttctaaagtcagtaaagatgtcggagccactttcagcagctgctctgaagaccctgaggtgcaagtggcaccccagccttaggcctggtcaagctctcctctggcaggcgtggctgtgcccagagccctggggagagcaggttcccctctatccccaacgcagagacgtgggcagggtccagcacgctgctcccctgctctgtcctgaacaatgatgccccggcatccttgggaacagggtcggccgagcaagctcaacagtgcctcaaatccttcccccaaaagctcttcgtaacaacatcactctgatcttatctctcaaaatctgatctgtcaaattaacccagaaagccttgctttcagaatacccagggccagtgctcacacctctggggtctgttcagtggggtcctgacagcagggctggactcacccatatagggccaggctgattgacagggaggaggagcaacctgaggggggcactgtgagacagaggaacacgcacattcacatctttttttttttttttttttttttttttgagacagagtctcactctgttgcgcaggctggagtgcaatggcacaatctcagctcactgcaacctccgccttccaggttcaagagattctcctgcctcagcctcccgagtagctgggactccaggcgcacgccaccacaactggctaatttttgtatttttagtagagatggggtttcaccatattggccaggctggtctcgaactcctgaccttgtgatctccctgccttggactctcaaagtgctgagattacaggtgtgagccactgcatctggccacattcacatcttaacagacagcgtcccctaccagaacataaactgtttcaaaaaccctcactgggccaggggcggtggctcacacctgtaatcccagcactttgggatgctgaggtgggcggattacgaggtcaggagatcgagaccgtcctggctaacacggtgaaaccccgtctctattaaaaatacaaaaaaaaagaaaattagccgggcgtggtggcaggcacctgtagtcccagctactcgggaggctgaggcaggagaatggcgtgaacccgggaggcggaggttgcagtgagccgagatcgcgccactgcactccagcctgggcgacagaccgcgactccatctcaaaaaaaaaaaaccctcactgtacccaaagtggtgtgctaagatacatttctgatcaagtttttggctgaaggacccacagatttattaacatgtatatggggccaggtgcgctgactcatgcctgtaatcccagcattgtgggaggcccaggcgaaaggatcatttgagcccaggagtcagacaccagcctgtgcaacatagcgaggctctgtctctacaaaaaatctaaaagttagccatgtgtggtggcacacacctgtggtcccagctactctggaggctgaggtaggatcacttgagcctaggagtttgaggctgcagtgagctatgattgtgccaccgcactccagcctgagtgacagagaaaggtcctgtctttaaaaaaagaaaaaacaaaaaacaaaacacgctgtctcttcaactgttctccccacagcagccctgtgcttggggcttacagcccagggcctcaacatcatggacaacccgggctccctggccatacaacatgtccacccggactcagtgttgaccaggaagaccaacccctgcacccacatctggggtttcactcagagggaacccctctgctcagcaaagggaaatcacgtgctttcttcggaaggaggagagagaggaattgaaatgcccccgccttttcttaaagataaaactcaaaaagccatcaaggctgtcgtctgctctgagccatctccctcctccctgaagcccggcaccctactcctgccgtaatgagttcccatgactcctggagctctgcctggactaagaggcggggtgctgcagctctgtaaacaaacagcactgtgcttcccactgtcaaggcctgttggcttctcaactgctgaaaccgtttccaagttgatgctgagtggccagagctttcctgcagtgctgggtcgctggcaacagggcctgtgaggctcatttcctgcctgttgccggctgtggtggcgttgggcaggagctggctggtcaggtgagggtgggggcagcctccagagacagacatgggccttgccctaggctgcatgcccatcttcagggagcctgttgatctccctgacaggtgaaggtccccaaggctgcagcctgaaagcagggaccaccaactcacagctcctggagttctcaggcccctttgtccacctcaggcttcacaagccagcagctgccataacccaaccccctatccctcacatagcccccaggcccatgtggccatacctctcttcccaacccagactctggtccaggcacgtcctgctcagggaccgactcctcggttgacccatcatttctgtgcagggcacagccagtgcccagcctggacaggccccaaatgtctcccgacactggcagctgcccggctgccctacagccctgccaaacccactgctcacccaggtagcggcctccagccttgatgacaatggcacttcggctccgcgtctcctcctccgcctgggccatgctctgccgcgccttctggtaggagtcgtcggtggcacacaccgtgatcttgtcctgtatgctgcccaggcagtccaggtgaacttccccatgactgcaagacaaggccaggagctggggtcagcagctgggacaatgcagggaggatccgttgagggcccaagcccccagcccaccacctggcctggaaaatggactctgtcaacaccatctcaggcaatatggtttcaatggggcacatctcaaccctgggccagaggtggcagggtgacctcaagagccggcggggtgctctggggtggggcggcgcctcacctggagacatactgctggatgcagtcgaagctgccctgggggttgtcgcggccgatgttggagaggtagaaggagaacgtccgcgcctctgcggggcagtcaggctgggggatggagatgtgctgcgtggagggggagggggtgtcactgggaggtcctcggcaggacaggtccccagcctgcatcttcctgcatgagtccccacagtgcaaccctcacaacaggaatgtgctggcccttttccctaaaacacacccctgctcttcagccagtgacgggacaggcagcccatcctcagcaacacacactgcgtagagaggggactcaggcacctatgcgggtgggcatggggccaggggccgttttcagcagcaacagcactgctgtctgaggacagtgctcagcacctgcccagatgcagggcccccaccccaatcgtgtgacccctggaaagtggtttgtctggaccatgactcactttccccaccaccaaatggacagacctggcctgcgacaccctatgaggtaaaatgcaacaagaggggcttgggcagccacgcgcaactctggcgcccctccttggcgaccccctctcagcatccccccacaaaggacatggactccacgtgagtctccatttgctgcagctgtgaatcaggtaggcttgtgtcccaggggctcacagatcagaagcactggcccccaacaagcctgtcatgggtcacaccagcctgactttggctgtgcccctgcagcccagctgggcaaagctccagccctgtctgggaggacggacagccaggggcaggcaggcggatggacggactgcgctggtcccggccaggctcagtgcagggcggcatcacatcagaggccattgcattccaggctgaccccagaccctctgtcaacagagttggcccttcctaaactaatgcctgggctttggcatgagctcctcacagttagactgacacatgaagggcgctcaaatagtccacaaggaggggacaacatggggggagccctcaggtcttgtcccctggctgcagcacccccttggcacccaagccccgtctcctcctctgtgacaccatgagcgcgggagagactgtggctgaatctcctgccccctcgcccctgctgagctgcctcatacgcccatgggaggctttgcctgcctgtgcctcacctgtgagacaggacggggctcctgccaccagacacgtggaggagcaccaatccccggccctgctgtgtggccttgactgggacttgtcccctggggtagtgtttggacacacaagggaagccatggctgcacccagcccagtgccagtccctgctcccaagacaagaacagttcctgggttcggccacttggggcaggaagagtctggtctgggcttgcaggcagtccctgtaccagccagtctgcccggcctgcagacccttctccagaggcccatcctgccccttccccaggctgaacactgccccaggaaaaaagccgtcccatctgctggggtctgcccagcatcccctctcagcctcgaacatgtccccctaaggcaggtgcccttgtccctgtcatgctgatacagaaacacaagctgaggggtcagggcccaaacagcgtgctggtggagggcaaggccaaagtccattgtgggcccaccatgccaggccacacctgaacacaaacacacatctctatcagggtcagagaaggcagaaacggcctgcactcagcatcggagaaatcacacacatatagcctctgatgattcaccctcggacagagaaaccctccccacccgcccccaccacacaaccacacacacacacacacacacacacacacacacacacacacaaacacaacccctccacacacaatctccccacacacaatcccccacaaccacacaatccccacacacacacaaacacaacccctccacacacaatctccccacacacaaccccccacaaccacacaatccccccacacacacaaacacaacccctccacacacgatctccctacacacaaccccccacaaccacacaatcccccccacacacaaacacaacccctccatacacaatctccccacacacaaccatacacacacaatacccaacacatagcgccacacatacaaccaccccgacagcaccacacacaacctcccccacacacaaacacaacccacacacacaacccacacatgcacaacccccacacacacagccacacacaaacccctccacaccaaacccctccacacacaaacccctacacacaaccacacaaacacaacccagacataaacccccacacagccacacaaacacaactcacacataaccacacacacaaccacaacccacacaaacacaacccccacacacacaaacaatccatacacacacacacacacaaacacaatccatacacacagaaacacaacctcccacacacaaacaaccacacacgccctgaagcctcagccagagccatgtgggtgaccctggccatccagatctgtcctgcttcgacgccactgaggtgttttttcacccaacacacacaggtgccaccctgccctgcctgcacctcccttcccagatgtgacttttattctcgttcatacaagaaactggaaacacgctgctgggatgagggaagctcaagtttgtgagaggctctgtggtggccaggtgcacaggtgacatggtgacccagaatgagccagccagggaagctggggaccacacgtccagggaaaccaaaaagagtggctgtgggaacctgagcctggcctgggtggctctcccgccctcctctgtcatctctttaacccccactgccccctgtggtcctggcctgaggcccaagttgccagtggctcctgccccacagtgactaagggctgggcaccctcacgtgcagccctgtcccaggaaaaccccagctccacccaggttggcaggactcattctgtcaccctggcttcaggggagatgccactcagcagagagctggcagtgagaccaggccactgcctgtggcctggggcagctgtacacccagtcagcactgacagggcccccctgcctgagcctgcccagcaaccttgcttctctgtgggtaggggcttcatagtggcccttcaccctgcttggatcttttccacacaggtgtagacatctgccccccaaactccatcctagaagcaggggccaggtgcagagcccagggccaggtgtgcagctgtggcggggagtaggggctgcatgaaggggggtgacacaggcctcaaagctgatgctcgggagagtgtcgtgctgctggcgaaaaggggaagacacacagagggcatggcggttggcgtccttcaggatgcaggggtgagaaggtggggagagtgttaggaaaggtttcccggagccagacaccgaggttctcacaggccctgcctcccctagcacacgaagcgctatggagccctctgattaacgggctgttttgctgctggttaatggttaccagcccgggaccgtggggaagccagcgggatgggagcagcccaggaatgcggccactttcttcgcactagccaagagcttgcccgggttctgggacaaggtttgaaacgcagcccctgctcagccttctgaatggggtcttggttgctccttggggactgctcatgggcccagtgacccacgtaccagtgggctgccatggggccctcagatggcccacgcacagcaggtctgggtatgtctgaggtcagtcccggctccaggttatagggtgtggggaggagttgccataaacctaagcactagtccatgctcacagacacagagcccaggccacaggggctcatcctaggcgcttccgcagggcccaaaggcccgctctgcccttcccgctgacctgaccatggccaccagggggcgttgcttccaccaccgctcaagtccctgccagagtccgttcatctcttccctttgaaatccatcccaaattggggcctgctgcactccccacctgaccccagacaggagcttgggcgatgctggctgactggatccatgaaggaacaccatccagggggcgttccgacaacgatgagcccagtgcaggctctgtggcaggctgccggcagcatggcccaggaccaagagccccaaagctaacagcccactaaagtgaagcagctggccaggcgcggtggctcccgcctataatcccagcactttgggaggctgaggtgggtggatcacctgaggtcaggagttcgagaccagcctggccaacatggcaaaaccctgtctctagaaggaggttagctgtgtagccaccccaggtctctctcagtgacttgggcccctgctacacatgttattaggctccaggtcaaggcacatggcatgctgcacgcaaggacaccactgtgtgcttcggccatggccaggctgcagtgtgtcatctgacgggctcgctgagatgggggttggggatgaggggcccccccactgctcaggttggggtagaggggcatgggtggtcaggcagcagcagaaggcacagagtgactgctgtaggacaccagagggcactgtggggctgctctggcagcaagcccaggccagcccgcccctgcccccaacctctgacccctgagagaatgtcctggggaaggtaaaaaggaggtggccaaagggtgaccacaagacccaactggggctgatggaagtgtggggttgtgtcaactggctaggctgcagcccctggagattcattattccatgacatcccgtctaggggtgccctggaggtactctgtggacatggttaccatccacaaaccagatactgaaagcaagtaaaggagatgaccctcgatggtctgggtggtcccatcgaatcagcccaaggccttaagagggaaactggctggggtttggcaggaggaggaagaaactctgcctgaggactgctccatcagctcctactggaggtctgcagccagccctgagggttacagactccccagcccacagtcgtctgagcccactgcttgcaatgcatctttttatcagcacacacagacacacgtctcctagaggctccatgtctctgcagaaccctgggctgcacctggaagcccatggatcatcatgtccatatccccacatccagctgtgcagagctctcaggctgtggacagaaattgatttaggtacaacatggtaactctaaaagaaaaaaaaaaagttgggtgcagtggctcacacctgtaattctagcactttgggaggccaaggtgggaagatcatttgagcctagaagttcaagaccagcctggacaacataatgagactccgtctttacaaaaataaaaataaaatttgcctagcatggtagtgtacaccagtagtcccaactacttgagaagctgaggtgggaggatcccttgagcccaagagttcaaagctgaagtaagctatggttgtgccactgcactccagcctcggcaacagagagactcatctcttaaaaaacaaaacaaggctgggcgtggtggctcacctgtaatcccagcactttgggaggctgcagcaggtggatcacctgaggtcaggagtttgagaccagcctggccaacatggtgaaaccctatctctactaaaagtacaaaaattagccaggcatggtggcaggcgtctgtaatctcagctacttgggaggcttaggcaggagaattacttgaatccaggaggccgaagttgcagtgagccaagattgcaccactgcactccagcctagatgcaggggaacctgcaataaaggctagaagaaaaatcaaaccattctaaggcatatcgggtaggttaggggagatgaagagtcctaaaacagggggtcaaagaaggtagatgactcaccctttctctcattccctgatttttctataagatggtcatttagaagaaaacatatttcaaaaaaatgagggtgctgagtttctatgaacctctctcccaaccaaaatccagacaaatgtccaaggtccttgtgtgccctaatgcagcagtcccctacctttttggcaccagcgactagtttcgtggaagacaatttttctttttctttttttttttgagacagagtttcgctcttgttgcccgggctgtagtacaatggtgcgatctcggctcactgcaacctccacctcccaggttcaagcaattctcctgcctcagcctcctgagtagctaagattataggcatgcaccaccacacccagctaattttgtatttttagtagagacgcgtttctctacgttggtcaggctggtctcaaactccagatctctcaggtgatctgcctgcctcagcatcccaaagtcctgggattataggtgtgaaccaccacacctggccagaagacaatttttctatggatggtggaagggggacagggagccataggggaggatggtttccggctgaaactgatccacctcagatcaggcattagattctcataaggagcacgcaacctagatccctggcatgcgcagttcacaatagggttcgcgctcctgtaagaatctaataacaggctcagctgacaggaggcagagctcaggtggtcgtgctcactcacccacagctcacctcctgctgtgtgggcagttcctaaccagtccagtgctgggggttgggggcccctgccctatcagagtggaagctaggtgcacatcgctgcatgaagggagccactgggagaggagagccgcccattgcccaagcagcctgtgacgtgcacccgacacgtcctggtgtggccccagccaaggggctatcctgggggcctagaacccagccttgcatggtggcagacagggcccaaacactgccatgagctgctgctgtacccagcgagcaaggacagacctgagactataccagtcccaagattccaaatatgaatgattaagacaaaaacttaccccttggcttccttgaaatcggatagatggcctcagtgaaacagaatcctataaaaaaaaaaaaaaaaaaaaaaaggtgaggggaacatcaataaagacattgggaaacccaaagactccctccccaggtatagaaggagcagggtgaagatggtgttctcaggagaggggaaaggaaatgcacacactctgaaaattataggcaaggtcaccggagcagggttttagaaggatcagtaggagttcctcagatggacagagggctggggacacatgacaggtaagaatggggcctccagacacaggcaacaggctggcggaaggcccaggatgcaggggcggggagtgtgccatccttggaaagccaccaccagcctgtgaatccaccgggagagaagggcaaggctcaaggtgctcacagccctgccaggaaaaagcaaagacaggtcagggttgaccctggatcatgactctcccaaggacccatacaggcaaaagcagccccctccactctcacagccccagctgatcccctgaaaccaccaaccaggctaagtcctgtctcacaaacactggcttttaacaaccaggtgggtgagcactgtctatcagagcaggtgcggtggggccaccttggagcctggggtgggagcctgaggcctgcacagctccaccacacggccttggggcagtcacatggcttctggacagctggtcactgagcttggagcagtggaatttccaaggaaaaaatatacaaaagagctcaaaataaatactgacgcttcagctattcagagaccagccttctggcagtatctgagaaagaactgcgagccagaggaggactgcacctctgcatcttcttccctcttcccaacctggggccctaagcgtagatctcagtgtcccagatgctaccccacagcatagccctggctgatcaccatgattcttggtccccaaacccacccctgcaccacctggccccactgccccactcaggtccagcccactgagatgccctcccacccaggccttgctcctgtcctcatagtaccccgtcctgggctccgtctccactgctcaggtctcactccctcccaccctggtctgcccatagctctccccagagggcaaagcactacttgagtctggagaggcctgtcggaagacccggggtaagcggagcagctccacacctgcgacagtatcagagacaacacctaccccatgggtcagcccagggtccgccctctggagccactcagcactgttccaggactccagcttgagatggcacagggccctccaactgctcacatccagtgcccatcagttgggaaagacaggagctgctaggagcagcggaagccgcctgggacatgagagatggctggcctttcagcacctgctccatgtgtgccctgagccatgggtctgcttggccagcttagaccacgcagctgtatacatatgacatgcatagtgcccagagtgggaggcaccgagtgcctcactttggtctaccaggagcccccttctttgccaagtctctccaaggattttgccaagactccccaaggattctgctgtttaggggagaacagagggatggtgcccctgcacgctaacaccacccaggccgtgatgccccagaaactgccccatgcttctcaaacacgccacccctcaacaaatacatgggcccactccacagcgagcacgattcacggcgcaagccaccactgtccatggtgcaacacgtccatggcccactcccttgtcctgttccaagaccaggaaacagctgctgcagtcacaagggccactgtgctactgcgacaaggggggctcgtctagagcagctcaggaagggctagccctgtaccccaaaacacgactcaaccaccagcctgtgctgctactgcagagaacaggggacctcggcctggctgggaccttggggaagcagcatctgaatgacctttgctacaaatttggttaaacaggccaggtggttcacgcctgtaatcccagcactttgggaggccgaggtgggcagatcacttgacgtcaggagttcgagaccagtctggccaacatggtgaaacccccatctgtactaaaaatacaaaaattagctgggcgtggcagtgggcacctgtaatcccaactacttgggaggccaaggcaggagaatcacttcaacccaggaagtggaggttgcagtgagctgagattgcaccactgcactccagcctgggcaacagagtgagatcctgtctcaacaacagcaacaaaaaagaatttggttaaacacagacatgaaaaagagacctatagggaccaattaaggtgtgaaaagacaccggatgccattactcatcaaggaaatgcaaactgtaaccatagtgacctagattgatagccataaaaatattttaaaaaataaaaaaaaacataaccacactgagatagctctgtacccatcagagcagctaatctaaaagaagctgacaagagcaagtgttggcgaggacccagaacctctgccgtcgtgggcgggagtggacaaggctcagccactgtggaagccacctggcagttttctaaaaggttaaacaaagggttaaacacacccagcaattccaccccgggtatacacccacaaaaacacacttccgtacaaaaacttacacctgaacatttatagcagaattatttagagaatccaaaaagcggcagtagcccaaatgtccgtcaactggtggagagagaatcaaacaatggaatacagaggaccatgccaagtgaaagaaggctgcacgtcatgccacaggctgtatgactccatttctataaatccccaggtaaggcaaaaccaaagagacagaaagccgaccagcaggtgtccagggctggaggtgggagtggggagtggctgcagccgggcgagggtagagggtcaaaactcacaagatgggacgttttacaggatgttcgctacaccttcccaactgcccttgagctcacaggggccgtctttgttgactcagggcacaggagcaacattctctgacacacacacggcgagttctggaacagacggaggagagtcctgtccgttaaccattttcaatgcacgagtgaaagggaactggcgtaagacacaagaaccacacggagcaaaggaagcaccaaggcagaatggcccagcccaccccactcagggagcccccacaaactcatggcaccagtcctcatgggccccaggagcacacgaccaaggccaggtgggaagggtattctggaggagggagcagcaggggactggagcaggaactcagtgcagcagctgcagagagcaggtgggccccgtctctcgcggtgcaaacctctgcagaggggtcggcccggggctaacacaagcaccctgtctactgtccatgcgaggcctctgcatgtgcagctgtgagccagggatgagggctcagaaaacagtgatgatgctgaggccagttagggtgacaagggacaggaaccagttagggtgcacaacccccccaaggaactgtgccagggcagccccagctgtgcaaggctgagggtgacaggccttgaacacactggccctcccacccaccccgtggctccatgctccctgtgggccacgccatccagtgaggcatttaaccaggttctggtagctgactgtcaggtgggtcaccttcaagactcctttcttgccaagtcgcttatcccccaagggtatggagaacaagacttcatgcctcagaggagaagggctgaggggccacagagccagcctttctctatgatgccaggagggctaacctcaagtgcctgtccccatgagaggtggccgtcatcatggccaggctcccagccactctggctcacactgtatccccaccctccagcaggagaccaggcccttgttaacaacagagcaattcactcctaacatcacgcacgcatgagggtgacagacacaggacgcacccagccattaacagacacgggcactaaggctaactcccgtctaaatcatggccagccctgtgcggaccatcgggcagggacccacctcataagaacgccatgtggtatctataagcagaaccctacagacacgtgaagcagcaggaaaacgagactcctaagccagggggaaaatgagtcggcacaaagacgtgggaagcacagagatgccgactgaacagacaggggctttgggacagctactgtgaacttggaatgctccaagcctaaaggaaaacagctgaagaggaagacgtacgggtatcgtgagagagccacgaggggcttctggagctgagacacggaggatcggaatgaaacggccactaggtggaagtcacagcaggcaccacagaagaaaagggcagcgaacttgaagacaaagccacaggagccacctagatgaatcccacagtaagaagcctacaggaaacgaacaccacctcggtgacctgcggacgacagcaggggatcccacgtgcaagtaactggagtcctgagggcaggcgggggatctgagaaaagagtggccagagattcccaaatgtaacaaatgctataaatccacagacccaagaagccttgtcaacccccagcaggaaaactaccaggtcgtggcgcatcatgagcaaatcagcacagccacaacagtcgccccaagtgccgaggtgccgacactgcacatcaggagccagccccgacactgggagggcatcttcaaagtgctgagggagaaacaccgccagaccacaattccatgcccagtgaaaagagaaagggaaataaagattcgctcaaacaaatgctgagagaatcttctgtcagcatctggcctgcactgtgaggaaggttctagaagttcttcagaaggagggagagtgaccctaaatggacctatggatttgcagaggatgacgcgggcacagtgagcatgcatgaatagaaaaggcttttttcttatgatgtttctgcaaaagatcattcaaggcataaattacggtagtgaggctggggttttgaatgtggggtgctaaatagatggtgatgagaacacaaggactgggtgggggggatgagaaaaaacacagaaagcagctggggtgcagtgccctgacaagccaatcaagggcccaggaggtgagtgtcggctgcagacaggcagagccagctaggtcccttcacggtgggaccagctgtcaccctctgtgctcaccagcctggcctggtggggacgcctgacagcatgtggcccaccacaccctcttctggctgctccctccagagccaacatgcgtggtgtcatggccgaacccttgtcaggggggccaagcgcctcgttacctcatctatgaagcaggacagagggtcaggaacagactgtagcacaggtgatttccctgctgccttagaagctttggggttggcctcaggctgcattaattaaataacggggtaactcagtagcacatgacacctgcagggtactgcccatctcacacccaagaacacccagcaggggagagccatgcctcaggccaccgcctgcccagtctctgtagaccctctgaggggtcatcacccccacaagtcctctcaggccctcgagtggcaaaaatccaactttcattacccagcatgaggtatggaactgggagctcctgagatacaaagtcacccccgctgctgtacttcaggccagggccccaggtgggagctggggagcctggtagggccgccacagctggcctgacacagtcagcaggtcagctgggtcttcaaggccggacaggcaggcactgagctgtgccgaggctggtgctccccagacccaactggacttcagaccctgactcggagaacagacctcaacacagcagggcagtgatgcctgcgccctgcggtcacttggcctgggcgcccactggggctactgaacacagactgggagactcctgtaggcagctccccctcaatgaggacactcctgtaaagacagcaatgcctttgggaaaagggtcgagggtgcagagcctgggaggcagtgagagtcctcaatgctgagacagaggaaagggtgaggaggaacctctccagggccagaatcccctgatcctctcccctccggcaaagagcacttccggggatgaagcaacaggaagtggcttacgaaatccacctccaggccgagtgaccagtttacaggaagtgtggtgggtgaatcttccccagggcacgaggcaatgtctggagccatttctggtcctcaccactgagggcggggacagtccccaccatctggctcgggggaggccagggatgctgctcagcacactgcaggcaacacagaacctcctgccccaaatgtcaagcagtgcaggggctgagaagccctgggctgaccctgccacgggaagcgaccatcagagcagaaagcagaaaaatctatgggaaaaaagacctgctcccttcaacaaatataaaatataaatggaaaagttacgggtgaagaagaacgtatctgattgttggccaggcatggtacctcacacctgtaatcccagcattttgggaggctgaggcaggtggactgcttgaggtcaggagttcaagaccagcctgaccaacatggtgaaactccatctctactaaaaatacaaaaattagccaggcatggtggcatacgcctataatcctagctactcgggagcctgaggcaggagaactgcttgaacccggtaggcggaggttgcagtgagctgagatcaagccactgcactccagcctgcacgacagagtgagactccatctcaaaaaaaaaaaaaaaaaaaaatctaggattgttttaaaaactctccagcaaagacagaaactagggagagggcacagtgaagagatgagacacacagacagatggacggggcccaatctggccaggtcccaggatacctgctaccagcctggggacaatgaggcccaaggcagcaggtgccaaggctgccccaaagacacatgatccttcccaccaccctccagaagcacccactcagcagaagtgcccactctccccaggcagcacgttctccctgctgtctactgggcaaggcctgccaccccacccctgatgcaggaaatgacagaaaggaatgcatctgttccttcttcagaagtccatcttgctgactctcccaagcaccagtgtcagcacacacgtcctgatcttacagagctgggtcaccctgccaagccacggcgtgtggtccagcagagggaaggtgaagtcccgggaagagccctggacggtggcctccccacaacaggccccccctttccagtaaagcacaaatgattgggaaacgctattcaggaatcctccttgagacttcctggcaggactggagcaggacattgaggccacggagagtttagacagtgactgagtggggctgtctccgtgaactacaaaacaaaggaagatctgcccagtgagcttggttggctcagggacgagctagggaacttggacagacacattgtggacctcactggttccagcctagggaaccaggtggccacggtcagggcagagcagagggcaggacccacggcagctcctctgccagcctgggaggacagatggtgtgttcagcaggccaggtgggcctgtaagagcaggaaagggactccaactggctacaagccaagtgtaattcagtggccggcatagcaagtattttttttctttctttctttttggagataagctctcactctgtcacccaggctggagtgcggtggtgtgaacacggctcactgcagcttcgaccttctaggctcaggtgatcctcctgcctcagctcccgagtagctgggaccacaggcacacaccaacacacctggctaatttttctattttctgtagagatagggttttgccatgttgcccaggctggacttgaactcctaggttcaagcaactcgacagactcagcctcccaaagtgccaggattacaggtgtgagccaccgcacccagcccgcagcagatatttctatctgcattcacgaaggtgcatagaaagcttatggaaaagggtttttcagaaatcttgtagacaaaaatatgcagattgcccaaaactgtggcctctacacgctccacgcaccttgcttgcttttcccaggacagcacgctgagcaggccaccttcctttctgcccaatttcctgcatccccacttggagactgaccctccccgcaccctcagcaatcctggatctgtttttttgtccctatggttttgcctttccagaaagtcttatcaatggaatcacataagatgagtttcccgtggtccttgcaacaactgagcataaacttgtggcttaaaacaatggaaactggttctctcacggactgggggccagaagtctgaaatccaagtgttagcaggctccctccttttgggggctctaggggaggacctttcctggcctcttcacctgctgcaggctcaggcactccctggcttgtggctgcatcaccctaatctctgcccactggggtcatgcagccttcaagtcctcttctgtctacattaaatctgtccctctcttacgaggacacttgtgatgacaaacagggaccacccagataatgcagggtaacctccccatctcaagatccttaacctaatctcatctgcaaagtccctttttccacagaaggttacactcacaggttcctggaatctgctgtggccatgattcagccaaccacctactcagcatgacgcctttgagatccatcctgtgtgttgccccgcagtataaatacgccaccttcccgtgcatccatttgctggatgaaggacacaggttgtttccagtctggagaattaatgaatcaagcagctataaatactcatggacaggtttttctgtggacgtgttttcatttcacttggtgaacacccaggagcccgactgctgggttacagagtaggtgtacatttaatttaatatgaaactgccaggctggctcccaaagttgctgtaccattttgtactgccgccggcagcgaatgagagttcctgttgctccccatccacgtcaacatttagtgctgtcagcttatttaaaatgtcagccattctggtaggtgtgtggtgcagtgacagctcgtggaggttcatgtttgggtttccctgctgattaagcatgttgagcatctttttacaggctaatgtgccattcttctagcttcagtggtgaagctgtacaaatctttatcccatttttaaaaattgggtcattttcttactaagttttgaggtttttttttttatatacaagagctttatcagataaattttacattttactcctagtccatggcttgtcttttcattccttttttttttttttttttttttttttttaaacagggtctcgccctgtcacctaggctgaagtgcagtggtgtgatctcagctcactgcaacctccgcctcctgggttgaagcaattctcctgcctctgcctctgcctctgcctctgcctcccaagtagctgggactacaggtgcgtactaccacacccagcttatttttttgtatttttagtcgagacgggttttcaccatgttggccaggctgatctcaaactcctgacctcaagtgatttcggcctcccaaaatgctgggattacaggcgtgagccactgcgcctggactgcctttccattctcttaacagtatctctcaaaatacagaagttcttaattttgatggagtggaatttttcaatttttttcttttatgggtgggtcttgattttgtgtcttagttcctcccatctttttggtttttgttgttgttgttgttgttgttgttgttgttgctgctgttgttttgagacagggcctcactctgttgcccaggcagtgggcagtggcactatcacagctcactgcagccacagtctcctgggctcaagaatcctcccaccttatccccaagcagctgtgccaccatgcccagctacgttgtttttttaactcttttgtagaggtgggggtctccctgtgttgcccaggctggtctcaaactcctgggctcaagcgatcctctcacctcaacttctcaaagtgctgggattataagcgtgagccatcacactcccatcttttttttaaatagctctattttaggaaaatcctccaaactgccattctttaccaactcccctctcccctcccaaactagcagctctgggtaactcctgcctacacccgtggctgccacagcccccagtgaagggtctctcagattcctttgtctgcatgcaccctgggtcatgaccacagatgctccctggatattccccggatgccaccgcccacctggcagttgcagtgcagggtttttggacactatccaggtccttcttccagaaggcgctcagcaggtgagcagaaagtggcctgtgtctcatgggaagcccctcagatgtctgtccattcctgcgtcatagctgggggtgggggagctgcttggactccctgtccgtagaaatcacagccaaatcacacgcaaggactcgtggtaccacagacggccagcctccatcactaacccactctcatcctaaactgcatgggatcgggttccggttgttacaactgaggaaaatgaggtactgagagaggacagggctgcccgaggtcacagcagacctcatcccaacctcacaggaaaactgagccctggggtccccatgaagatttcacaacttatccaacctcacatgatcccagggtagcaggatatgacaaacatttactacacaattcttcaagttacagtgcttctatgtccctgagccctgcttcatcagacagacagaagtctccctccaagggagggacaagcaccctgcctgccctgcccaccctgcctgcacctccatgggtcaatctccaggcatggcccaggcctgcttccaggacagtgcatctcagagccatgcaacccatgcctggcacaagccctcctgccaacaccttaactttgcctttcccccttattattccaccttttgcatctgcctttcttcaaacagggaaagacgctgtcgtatgtgggcacctgctgcacaagtacactccatgggcacctgggccacagtgtcaggcccctctgtcccctctagcgcactctgcagtgtctgaaacagagcaaatctgcaagtgccagtgtgatgggcacagaatcccgtttggcagccagacgctgtggtggctcacgcctgtaatcccagcactttgggaagccgaggtgggtggatcacttgaagtcaagagttcgagaccagcctggccaacgtggtgaaacccccatctctactaaaaacacaaactttggccaggcgtggtggcaggtgcctgaaattccagctacccgggaggctgaggcaagaaaatcgcttgaacctgggagggggaggttgcagtgagccaagatcataccactgcactccagcctgggcaacagagtgagactcagtctcaagaaagaaaaataaaaaatttaaaaattagccaggtgtggtaatgcgcacctgcagtcccagctactcaggtgctgaggcagaaggatcacctaagcacaggcgatcgaggctgcagtgagccatggttccaccactgcactccggcaggggtgacagagagagatactgtctttagaacaaaacaaaacaaaacataacaaaaccggcaaggaagcacatgaggcttcacaaccaatgctcttttgcctccacctgtgctcctcaagaggagtgcaagagtttggtggggttttgtttttctttttaatcattcactaaaactcaccaacaacaggtactggacctaggaattttgaacggaaggccttcgagaaactgccctctcaccaaacctgccttctgcccatggtctgcggtgccagataacaactgctttcccccagacaacagtgaccatgatctgatcacatctgacaatggaagaagctaagggactgacctaggtcactggggtcctccagggcacagcatgggcctctcctagccctgggttcctgacgtttctgaggtgaatgagaacgctctagggcctgacatgggccatcccctcatcagagcccaggccaggcctctgtgggggttgggtccctgagaatgcagctctgccttgccactgtgcttcctgctcaggcagctaggaggtcccaaaccccattcacctccatgggactatttggagcccagcagaagcggcccatgggctctcctctccccaggaggcccctccaggcctccatctcaactcccctgcagacaaggccatgtgtgtgccttcgacctgtcagtctgtagggccacctcacttttgggccttccaagctcaactgctattagagcgcctcctctctgccacactcccaaggccacccgtcctcagcctcaccacagagcagactggccccttctgccgagccccagtgcacccaagctttccagctgcctccacctctcccctgaaaacagctaacactccactatgggagcccatctcctcccagggccagggagaccagggagaccagggagaccaggtctggcccccaactctaaggctcatcttagaggcgagattcaggcccagcccagggtgccccatgaggcctggtggttggaggcagagggtatcccttgcccaaattcgtgccacattcacagtcactgggaaagctacggggatgggccgggcgcggtggctcacacctgtaatcccagcactttgagagccaagacgagcggatcacgaggtcaggagattgagaccatcctggttaacacggtgaaaccccatctctactaaaaatacaaaaaattagccgggcgtggtagcacacgcctatagtcccagctatttgggaggctgaggcaggagaattgcttgaacccaggaggcagaggtggcagtgagccaagatcacaccactgcactccagcctgggcgacagagcgagactctgtctcaaaaaaaaaaaaaagaaagcaagctacggggatgaaaacagttaaggcactctcctggatgcatcacgaagcccctcagccactgtttctccctgagagcacagccaccccctgctgaccttggcaggaagcaacaagccccacagcacaaacacccccaggctgccctgcagagggggctccacctcgggtgggagccctgcaacctgggaaggaatctggggaggggcttctgtgtgaagcttagctcagggccccaagggcggtcagtgtcaggcactggctcaacaggggcaggaagagagaggctgctgagcacctcgtcctcaggccactctgccccgtttctaacagtctatgtacaacagacccacccaagatgtactctgtgacccagagtgggggtgcggtcctgggagtgtccactgtggatgtgacccaggtcagaaggagatggcagcttgccaagctaccaaggcacacactcaggacccaggaggaccgtccttcctcctccggtggtcggccacactcaccaaggctgcccctgaggccctcagagacccaggcggttctgagaagggagcctgtctctgaagcagaaaccacgccctttcacggggcccctgtgtcacgtcagccgcctggatgattcacagctccgcaccggactcggctcttaccgcctcatctcattgtctgctcactgcaacctctgcaaagcacccaaacccctgtcccagaagataggcaaagatcacagaaaaataagaggatgccaagagaatctggcacccttcaaggcatgacccgtggtccccagccagtactcactgcaagggtgctcttaggtccccttcccagtttgaacctgcaacctgggagctgccacatctggacctcagggatgtgaccttgccagccacaaaggttggcatcgggtcctgcctgccacctcacccacatgcgcctctgcagccaaccaaagccttccaagatgctggcctccaccgtcagctacatgccatgctgacacctccgatgcttccaccaccacgcagtgggtaaatcctaatcactcaggaacacaaagaaggccctgtgcgtgtagaccctgctgctcagaccccgctaccccccaccaggagaccccctgagaaaggagtaactgcttctgagccattgcccatatgggctggcattccccataaaaacccattgagggctccagaggcttctgggaacatctggacaatccaaccaccccagagagtagggtcacccctcaaatgggcaggcccagtgaggacagagcaagcgttacatatgtgtcctgaggtgggcatcaaggaggtgccacgagagccaggccccagtcttccttcgtgcttgaggagcagctgggtttgggggacagttgccctcagcatggccataaaccaccttgagtgcttaggatgcgcacagatccctgaatgtgctgtctcaggaaaatcctccaccttgctgggtctgacagaggcagctgcatgaaaccagcccacttttaactttagagacagaacctgatgtggccacggccaggctgcactagcccctcagggaggccccaggccagataagcactgcctgcatcttccactgaggaacatctctgggacgaggacccgtgcagctgcctgatgctcaggttcatcaccaacagcaccaagttgttcctctggagagaatgaatcagtcccttcagatcctcatcctcctgaaagttgagcacatggcttctaacaggcccaggtgcttaccttcggaacaacgggatcttctattacccagaaaaacaaagtagagccttcccggtacaatctgtactttcagaatccgaacactcaggagctgtgctcagaacctggctggcagggcctgctctgccccatccagctgtggtcccagccaccagactccaacctaccctgacaggagccctgtgcctgccggccccacctcactctggccacaaccaggctggcaagtgtccaccgtggtctctgcccagtaataacctcagcagtgtggtatggtgtggacatcctcacctggtgggcccatcctgagaaacatgcctgaaggcacccggcaggtgagcagggagagaggtaggtcccagcccgcctctccacctgggtcttatctcacaaaaggatcggccctgttattgggttaggtcgtgggtaagcgtacaccaagatccgccaactgacttcttcccagaaagatgcccgtccttcagagcaaacggcctgacaagaaatgtcaccaaactggactcctccccaccagcagcatagaacccagagcacagctcccacagagccaaaaggagaccacacagcaggaagcacgtggcactgccaagctggataggagctgcagaggcagcctgtgaccagcagggcatgtgctggccagggctggcccagggcaagtccccaaacctcagagtacccaggaggccctggggctcaggatccagggctctagggaggggctgcatgctcccagcatccacggggcgggggctagaacagaacatgctctgccaggtgctcagcgcccacacaccctcaaaagtctgatcgcagggaccttctatggaccgggctgtgcatcttgagggccaacttcaagcaaaggaaagcctgatcacagggaccttctatggacagggctgcgcatcttgggggccaactttaagcaaaggaggagactgaggctcagggaagccaggtgccttgcttaaggccaccagctcagtaagtggcagggcttgagctgaaacacaggactctcccaaaatgacgaggcaatggcaccctgctatgtcagaatgtgtcttttctccttccaaactgacaaactgactcttcacaggcgcaggtcatgcgtcctggaccggctgaccagagtcctgaactgaagctgtgcaggcgcgggtccctgcatctgcagaccgacttccgtcatcccacctgcagggggtgtggaggagccttgcctgacagccggagggagctggagtctgaaatctcagctgctctttttacagaacgttttgtcacctgccttcaaataaaagcgcccaatttcggctcaaggtgacatggattgggtatttgcctagcagctgacacacaccagaaagcaggagacagcaggagctctgccaagtgtgctgtggatctaggtcagaacatggtgcaggtgtgagcgagggggcgtcctcccaggaacgctagcacaattccagaagtttcaagagaatgctgaagttcagccaggtcagacaaccacttgaccgcggacagatttagagaaagtcatgcaggcctgggcagacctcgggctggccgccccgggtgctcccatccccctcatgttagcccctggttcccccaaccaccactcactcctgctgggacgtcaagagccccaggttcttggctgctgccatccaagacctgagcctctcccagccagctctggcaccttctctagtttcctcagaggggaatcttacccaagtatctattggatcactccctgcacaccccagctgcctgataaggccggcaggcttagccctgcagcccccagcagcccacgctggccccttcatggtactcacactcagtgctgtgtgacccctgtgcctactgcagtctagatcctcctgggatccacctggccaacacctcccccaaggcgtcatcagagaggctttccaactgtgagggctcactggggccccggcctctggctgtgagcatctcactgattggggtgcgaggttggtctcttcccacctaaaggggagttccaggaggagcagtccctcctgtttctgctgacccctggggctgatggcctagcactaggacaacagaataagggcccagacgcgcactgagcagagatatggagctggccctgaccacgctgtggagcccgtgctggtccctcaagcctccagccacctgcacgcggggccagccaggccaggtgagacacagccttgcttacacgccagctgcgtctgagagcagagaaccctgctgtcgccttctctcctggacgcaatctaaaacaatctcaacttacaaaaaacctgcaagaacagtacaaagaacagccatattctgtgacgtttctgccacctgcccctcccccccacccacgcctattatccacatacttagatgtagcaacacacttgcttcttgaaccatttgagggccggctggagactttgccacactgtgcccctaaacgcagcatgtttcctgagagtaaaaatactcttctgggccgacacagcagggaccagcttcacatttattattaatatgacacttcaagccaccgtctgtctcccaggtcattgcctgacttggtggtgacctcacattgtcctccccgcagcgggagcccatgggcagtggcacactgcactcagctgccctcatcagctgcctctaatctgcaagtttcttggccattcttcaacattcaatgtttttgggtaacatagacccctcctcactttcttcatcagagtgtgctggattttgggtctgcttggtgtctcctgagaccaaatgcatggtatcttcccggccaagagccacacagtgaccacggccctcggaaggcatcccaccctcatcagccgtgagctctgacggcccagacagcgctgccccgtgccacaaccctcctcccctcaaatctcccagcaggtacccactgcacacccgcagccccaggtgtagtgcctgccatctgcagtttggctatggtggccataaaaccctggttctatctccactggcctggggaggagccccctctctccccggtctcacacatgctcaccaccggcagcaggtgacattctcacacatgctcaccaccagcagcaggatggctagcatcacacatcaatgtggttaggctacagtatccagctgtttggccaaacaacagtctagatgttgccatgaaggtatttttcagatgagattaacatttaaatcagtagactgttttgttttttcctttgagacagggtcttgctctgtcgcccagtctggagtgcagtggtgtgatcacagctcgctgcagccttgacctccctggctcaagcaatcctcccacctcagcctcccaagtagctgggactacaggtgctcaccaccacacctggctaatttttttttttttttttttttttttttttttttttttttttttagtagagatggagtcttactgtgttgcccaggctggtcttgaactcctgggctttagcaatccttttgcctcagccccataaaatgctgggattacaggtgtgagtcactctgccaggccaaaatcagtagactttgagtaaagcagatcaccctccaacgtatgggtgggcctcgtccaatcagtcgaaggcctggagggcctctggcagaaggactctaggcttgagctgcaacatccactgtaacctaggtctccagcctgccgtcctgccctgcagattttgaccttgtccccccaaccccataaatgcttaagccgattcattaaaataaagatggaccaggcacaggggctcatgcctataatcccagcactttgggaagccaaagcaggaggatcgtttgagcccaggagttggagaccagcctgggcaacatagtgagaccctgtctctacaaaaaaaaacaaaagattagctgggtgtgatggcacacacctgtggtcccagctatgcaggagactgaggcaggaggattgcttgagcctgggaggttgagattgcagtacagcctgggtgaaagtgtgagacccagtctaaaaaataaataaaataaagatgactttatatttacctacctacctctcttctctctaaatatacatatacacacactccctttagattctgttttgagagccctgaccaatacagactcacaggctaccttttgcaaatggcctggagcacgacactgcccttaaagtcttcatgttcagattgtcccaggctggctttttgtactggctcctggctcttccccaacctcctctgagcccccactgagaccatgacactaggagaggatccaggctccacccggcctgttctggccacaccatggggttacctacctctgtgaggaggccacattcggtgacctggaagcttcctcatccgtcatggtgacgctgcttacagaggtctcctgcacgggacagctccccactgccctatgtgcaaggacggccattcctgcatggctcagcctaggggtgtccttgaatttgagtgggatgaaggaacatatctgtttttcataaactaaaacgtagcatttccttccatttgaaacataagcaataagctacagtggtatcagcactatctgtgcctctgacgtgctgttagtgcatccaacgatggctgtgctgctatctggaaatgccacttcagctcaccactaattatggcagtgagactcgctactcaatctcattattaatgtgttaaaagagtcaatctgttactgggtcacatatttcttttgagcgactgataactctcctgacacacaagtgtgccctctcctcctctctgccaaaggcatccccagacctctcaactaccaaggaggggaggtgacagaagctgaagctggcagagggcagctcaagtcagaaagcagggctggagtccagcagccaggcccaggcccagctccactgccctctaagcggcatggccttgggtggatgagtgagcctctctgagcctcagttttctcttctggaaaaatggggccgtgaagtcccactggccaggctgcgatgacaccaggaaaagctaggacaagttcattcccccactcctctcatgattcctcccctccaaatgaaaagccatttcatttgcttcccactctccaaatgaaaaaccatgaccttgtcacctgctgctcctaatccccaggtggcttctaaagccaacagtgacaagcagagggaagagcaggctgccttcatcttcccctccgagaccagaccacaagggtgaccgagaaggaaagatggagcttatcccatggagacaagccacttctacaagtccagggatttgtctgagataataaaggaatggggctggggatcccatcagggcaattcagaaaccctggtgaaaagaagggccgctgtcaccacagtggcccaccaggccagggggaagctgtgcccacaccttccagaaaagatgggctctgtgctgcggccctgaggggcttgccctgggccctgggcagcataacaatgcatctggcccctctgaagccagggctgtgctgtcactgctggccagggcagggagggctggctccccaaatgcagggcctggtgctccaacttgggtggaaaacagagaccctgaactgggagtgagctgccgcacttgggaggagagagtgacatgaacatggtgtactctcaacctctgacccataccggcaacccgacaggcaaggcacgcagaacgactgcagccagacggccccacactccacagacgcctggaagggaggcgtgtgtccagctgtctccacctggactcccaaggctcagttggccctgcctcaggccctgccccagaagtgcccagctccctaacaggggctagggaagaaagtggcctacaggcccaccagcaaccccatccctttctcatggcccgggaaaggcctgctgggtcactgaccactcctcatagctctttgctctcttgtctgcacacacagatgtccaccagtggggacaatcctgaagacaattgaaaggtgatctaacctacgagggcacagtaaagtgagttcatggcctcttgtcccaagcaggtagacagaaacaacaatcagtaccagaaatccatccaaggacaggcaggtccacacagaccagaggcccccaagatatctccaggtctttctcccttattccaacctcactcctcctctccactgcccagagtgaatcgccacaaaaaaaagtttctgtttggagactgaggtaggaggatcgtttgagcccaggagttcaaggttatagtgagctgtgatcaagctactccactccagcctaggcaacagagcaagaccctgccacgaaaaaaattttaaaaagaggggaggggaaggggaggggaagggaaggggagggtcaaagagagagagagaaaaaggagagatttggatgtagacggtgccagccatgacagcatcagctcccagcccacgtaggaaggaaaggaagaaagttagtttcttttttgtttttttgtttttttttttgagacggagtcttgctctgtcacccagatgggaatgcagtggcgcgatctctgctcactgcagcctcctcctcccaggttcaagcaattctgtcacagcctcccaagtagctgggattacggatgcctgccaccacacctgactaatttttgtacttttagtagagacagggttttgccgtgttggccaggctggtctcgataatctgacctcaagtgatccgcccaccttggcctcccaaagtgctgggattgcaggcatatgagccaccgcaccaggccagaagttaatttctgattcccactctctgccctcccctccccctccccacctgtgctgatgacagaccccactgtccagccttctgggctctgaccaggtggggcatcttcctgtctctgccttcagagcttgggaggccccacccgtacctgagctggagcctcaccttcctccacttccctagccgggtggcatctggacaactctaccctgtacctctaggcagatgtgatctcagaaccaccatgtgcccaggatttgagagttgaaaaagacagcaaggcagaagtccagggcatatggctggcgctaactcaatcaaggtgtgggctataacatgttaggccctgggaactcatcagccaaggagacagatgtggccctgcccattcagagcccctgggcacaaatgttggagtagacaaaaactagagtgacacagggacccctggcagggctgttctaactgccaagggttagggaccactgagccgagagccgagagcagaagtgcaggaggcgagctgaccccaggagactgcaggccttgtggggtggtctgtggaggagtggggagggtcagtgtctggcatgacaaggctcgggagcatctgggggagggcctggccccacgtgcacatcaccagcaccctgggctgctggggtgtggagaggaactggcaacagcagcaaaaagcccaagcaggagttggtgggccccaccattcccacccactcactcgcatccccatcagggagggcacaacacccacccagctgccctgagtagcacagcttgcaacttccttgcttcaggcgtcaggaggaccctaaaggcttcttggaagcagcgccccgcatgagggtgcccagctcccactgcagctgaaggaggagggccgagagcctgcggagacagggctggtaggcagagtgacaggcggcagtggctgccccactgaggagaagaggaggagccacaagccctggctgagtgagcagaagccagtccccctgccccctgtacgagtggccactctggggcagtatgcactgcagtggagggatggggaggcaggcaggtcccacgcgcctcagcttcccaatactgaccaagacctgggctgtaggggagacttggacatggacagcgccagccagggcaggcccactgaggcctcttctgatcttaccttggactatgaggcttagggtggagggctgaggagcaggctcccgccacatgggcctgaaaggggctagcctccgtgagcccctaccctacctgctccacacagtgggcgtttggaggtgatgtgggaggtttatatggggactgcagagggcgtggagatgcaggcacagtgccaccgacactccactcggtccccacaacctcccggacagatggggttactccctccttatggatggggaaactgaggctcaggtgaggccatggctgcgccccacaaaagcacctttcagtactactgggccaaacattagaacttgataccagagctgtgacggccatgcctgagtgtgtgggcgtggttgtgaaaagagccacccgtgagccccaagaggtggccgggccactgcctcatccagaaaactcccctgcatgcaggaagagctcaagggctgctgtgcagagacactgggtgaggaaagagctcaaaatctccctgagggatgactcaggagacagagacctgaccagactcagcctcacactgcacccagagtgcttcctctacttcctgtggtaacagagcctgtcttcctgggctcgagaataaataaaaccaggtcaagtgcaggtaacaacttttttttttttttaccttattagaaacatatagtttggcaggagctacagagatcatgggttggaggcgtggagtagggttggggtttggcacaagtccaggcacaggcccttccccagtgtcccctgccagcaggtggggccagctccaggctgctgctgtccactcaggtggtgcggactgggggaggtccttgccaaggccaggcgggtagcacaggaacctgtggctgtggcccgtcataccaagtcttccactatgggcaaacatcacttcaataatataaaaaatccagaaggaaaagtctagtctgaaatgacaatgagataccaccacatgcttattagaatgcccaaaactcagaacagacagcaccaagtgctggtgaggacatggggcaacaggaacctcattcactgccggtggacatgcaaaatggtgcggcctcaacagattcctgaaaaactaaactaacatactctcaccatccaatgcaataattgcacgccttggtatttgcccagaggcactggaaacgtgcgtccacatgaaaaatactaattacagcagctttatttgtcattgcctaaactcagaagcaaacaagatgtccttcagtagatgaatggataaataaaccatgtcacatccagacaacaggatataacaagaaatgagctaggaaaccatgcaaagacatgaaggggccttaaaagcatacgactaaatcagccagtctagaaaggctgcacactgcacagttccaactacagaacacgctggagaaaaacaaaactatggagacagtaagagcatcggtggatgccagcgggcagaggggaggaaggggatgagtaggtagagcttggaggatttttggggcagtgacatgactgtgtggcactaccatggtggacatgtcattatacatttgtctaaacccacagaatgtacagcaccaagagtgtgtcccagtggaaactcagggctccagatgataaagacgtcaggctgggtgtggtggctcacacctgtaatcccagcactttaggaggcctgggtgggaagatcacttgagcccagagtttcagaccagcctgagcaacacagcaagactgtctaaaaaaattttttttaaattagctgggcatggtggcatacacctgtggtcccagctacccgggaggctggggtgggaggatcacctaagcctaggagatcaaggctgcagtgagctatggttatgctactgactccagcctaggcaaaagagtgagatctcatctcaaaaaaaaaaaaaaaaaaaaaaaaagatgtcagccagatgtgatggctcatgcctgtaattccagcactttgggaggctgaggagagcagatcgcctgaggtcgggagttcgagaccagcctgaccaacttggagaaaccctgtctctactaaaaatacaaaattagccgggtgtggtggctcatgcctgtaatcccagccactagggatgctgaggcaggagaatcacttgaacccaggaggtggaggttggatgagccgagattgcaccattgcactccatcctgggcaacaagagcgaaacttggtctcaaaaaaaaaaaaatgtcagtgcaggctcatccattggaaacaaatgtgccactctgtggggtggatgggacactgagaatgggggaggctgcaggtgcggggaggcggggagaagtatataggaactctaccttccactcaactttgctcagtattggccagagccaacccggatcactaaaactatttctgacctaaaattagatttcgagaagggcttcatagtagcaggacctgacgggaccctagggcagtcgcctcagctagaagacaaccaggaggtctattcagttaggaagggaaaacaaaactgtctttctgatgccaggcagctgcactcaacggtgtgagactgcacagtaccatccaaactcctggatttctatgattctgggaaaacagaatcggcagtgtcacgaccaggacagaaggtccggtttagcttcagggaccctgtgagaccctccccaatgaccagcagctgggctggcctctcaggacattgctgcccccggatgggtagacaggctgggttaagaacacagaaagctgggtgtggtggctcatgcctgtggcacttgggaagccaaggcgggaggatcgcttgagctcaggagttcgagaccagcctggacaacatggtgaaaccctgtctctactaaaaatacaaaaattagccaggtgtggtggcaggcgcctatagtcccagttacttgggaggctgaggcaggagaatcgcttgaaaccaggaggcagaggttgcagtgagtcgagatcacaccactgcactccagcctgggcaacagagcgagactccttctccaaaaaacaacaacaacaacaaaaacccacacaaatgtgtgcactagggacaaagctaaaggctggctccctcctgcacgccaccctaggccactcattctcaagcccaggatgccaggagggaagcctggcctcagccttaaagctgaggcagctcttgaggcagtgtcaacgacctctcctagctggagatcccagcagcacacttcactcatcccagcagggatgggagggctcaacaggaatgacacaagggccaccagcagctgctgggaagtgaaagcaaaacttctatcttggggcccaagaactgagatcagaagattcacttccaacttatgatctgccatttaaaagctgtgtgacctcagtaagacacttaacctctctgggctttgtcacacagggtgatgatctaacttgcaaggctgctgaaacaacatattaacagcacaaactggaccctaacatacccgtgacctccagcatctgcctgtaagcttctaaatgctggaaataaagcaacattctttaaaacaaaacaaaacacaaatacaaatcctgccacgaggaagggggcaaggtctcgggcccctgtagacttcccagggttggggagatggtccctcagcccaccgtgtggctgtgaatgatggacttgacatctgaactcatcagttttctcatctgtaaaatgggaataaccccatcctccctttcaggggccacagtcagggcatgagtagccacagccacaccacctcacggcatctgctcccgagacagaggaacagaggggcacaggggacaagggctgggagaaaggacactggggggctctctgggtctctaggagaacccaccagggatggctgatgggacaggccccacaaatggaggaagagcggggccgagggagccatctgaccacagaacatgctcagtgacctttctcaaaactgcatcaatgaccccaaataatatttagcaaggtgagagcaaacccattaagtgcttaagcaaaacacgaggccaggtgtggtggctcacgcctgtaatcccaacactttgggaagccgaggcgagcagatcacttgaggccaggagtttgagaccagcctggccaacatggcaaaatgccatctctactaaaaatacaaaaattatctgggcatggtggcgggtgcctgtaaccccagctactcagggggctgaggcaggagaattgcttgaacctgggaggcggaggttgcagtgagctgagatcgtgccattgcactccagcctgggtgacagagcaagactccgtctcaaaaaaaaaaaaaaaaaaagtgagaccaccagccacgttcctgttcccgccttcctcactcctgagacaggtgtgaccatgaggcttcctgtgcatatcgtgggtttgtaaatgaaccccactgggctgtaccaagtgcccttcaagaggtccacttctcctaccaccttcacagccgctccatcaactggctgcttgtgacatttgaaatcttacacacagaatccagttttctccaggcaggacctggcacagctttgttcccagagagtccattctcacaaaaggagagacgggaactgggaggttccctcaaggaagcagctgtgtgttggggccgatggagaggtcgactggtcccctgggaaggtcggcataacactggtgccctgcaacctcttggcgagctctccctgtgccaggccccgggcagcatggcagagggtggtcttgggctggaacataccattgtgcaaaatagctctgggaactgtcaggggccatacaaagctcactatttttcaactcaaaaacactgctttagctttttaatacgtcactgaggtacactgaagcatacccaagactctcaaaaacagcctaatacagtttgagtgcttcaaaaaataccagccaatttgcacacagatcacactcaggaaagtgaacacatggcggctgctcgccaaattcaactccacagagttgactctgtgactccacagagcagaacctgcagggaagcaggccaacctccaaccaccgaacttgggccaaaactcacagcaggagaggcaatgccgtcccatcccaagcatgtgggcgcacacccaggagaagaacgagcgggccacgacactgttctcgccagctatgcctgtgggcagcaagcagcacacctccaggggccacgtagacaacctgtgacacagtgaaccccactccacgccaaaccacccaatgggaaacagtggtgagcacagccatggaccacagagagtaacgcaagtgggcaaaacacatgagaagccaccaagcagacccggatgagagcaatactgtgtgtgcccagcaccaacaccaaattaagaggaatcaaaaaccctgctgagcgagagaacgtgggaaagggcctgggatgggcccactgttggcgaggaggggcccacgcctcaacaatgaggcggaccctccaacgtgcctcacacttcaaggcagctcttccaggccagccggggccttggagtgaggggccactggcagaagggagcaagacactggtccacggcacagccagctcagagccaggcggatgagacgggggccaagccaggggccggctactcacgagtgcacacgaggacagccaggattcactaggacaggatctgcccaatcccaggcacttcccactggtccatctgacacacctgggggcccaagaggtgatggcatcacataaaagcaaaagaaacttgaaaccaccaatccaggcaaattcggactctcccacaaatggtccatccttggggagcatctcccccacatcctcaacctccagctacgtgtctgcgggtgggcaggaaggaggggaggcagcatgggcaccagtgaccaggacagccctttccaaaagaaggccctgaacacagtcaagaggaagaggaagaaacactggggcctggcgggcaggtcctggggcctcatgagggtggtttggggtcagaagacacacgatcaggaaccaggcgtcacccccagaggctgctggagtgcgtcccacagaggcatgagcagcacctggcatggggacaaggagcttacagcaagtgggaggtgctctggtgctctacgctaagctgcctggtgccccacagctccacggggcaggagcacccgggaggctcctaccaccacagccagatagcccattgaggacgcacacccccagtccagcacccagaggtgaatgaaggattccaggacagcaagggagacacatgaccaccctagggtggaccatggaacagctgtgggtacacaaaggctccctggagccatcatccgtggagagcaccaactacgtcttctgagttgtgggcaggccaggaggggagggaggtgtcccaggtgagggccaggcctgtggtgactgtgcctcgcagtgggcagggctgccagaacccagcagtgagctcaccttagtcaattctgccagcgggcacccccaccaccagggaaatcctgcaaccagccgcatcaggagcagacgtttataactaaaagatcaaatatccccaaccacaaaagtcccagtaatccacacatgggacttcccaaaatcccatctctgagagatgacaactgaagaagccgaggaggaagagacggtgtttaaatgagagagagggcccaatgacaacggacaccagacacctgccacttgtcatgttgcagatgccaggaggaggagtgggaacacggggtggcagcatgggttagtgttctgcaaagaaacccaatgaccttcctgtttttgcttctgagacaacttagggaaggagttttgggccatcaatgcggaatccaaaagcccctgtcttgggaaaccacggggccacctggccgggtgtgccaatgcccagcagagcttcggttattaacagggcaggccagcgctccaggcaggcagctcggcacttccagtggctgcacacccaccacacacaggcacagggctgggaggcactgctcggctccctgggccctgccagagtggctccctatcacttgcttattttataaagtggcactttacagctggtttaatgtggtaaaacaggaacctggcttaaaaagaaaagggaactcgcactgtgccaggctggcacccagcgcagggacatccctgtaagcatccgtggtctggagagtgtccagtggcaccgcccgcccagcagtcagggccgcgggtatctttatggcatctgggagggagcacccccaccctggggtgataagtgggatgaaaagaaggtgacagagtttttctgtcttatttctggaaaaggcaactggcaaagctggagaacagcaagggagtgaagcagacccataggagcgagggagccccagcaagtggggggcacgtctggccaggctctgaggaactgagctgcccgtactgggaatcccaggcaggatgtgggctcttggaggtgatggaacagacagaacaggctattgcaggacacacgttcctcctcacccggccccaccacatgttcatctagtaacagttcaccaagtgagctgatgtggccccagacacccagagctcagggtacgtgcagagccacggctgctgagcactcaggggctgtgaggagatgtctgagcagtggtgggaagggacgggacctgttactctggccacctggagccagcgggagtggagaatgggctgttcccaagcacccgcctagggctcagaaacaccacccttccttgggtcctgccgagcttccctcctcagggagccttccctgctgcaggctggatgagggcccacgggactgtcactcatcactcccgttcagaatgcacctggctaactggagtcacacgtgggggcctggctgctgcctggccaaggttaaggacacacactctggccagacgctaggtctgaccccactcctatccatgtggacaacccgctcactcacatccccccgcctgatccaaggggctcactgaagcactgactcctcggcatccagggaggcctcgcctggtggctgcagcgtgcagaggatctgcgggctgtcacggcggatgcaggggtcaactgtgctggcacctctgctaagcatgcatcacttcattttggcctcctcagccacttgtgccaacaggccagggacggcacagagaggctggaggggtgaggctgaggaggaggggaggtgggcaaagggcatctgtcagccatctacctaagggtgtgctcactgacgcacagaggccactcctgctctgtttttccaaagcaatctgtgactctcgggattacccacatctcaagtcacatcctgattgaaatccatgacgcgtggcttgctttgctaaatttcccctacattttctacagagctcagcattcttcaactcccatctgaaattgccatgtacatctcatccctgtcacgttcatctctgcctgggaggaaggggaagtggctacagactccagaacctgcagcctgggtccggtcatcagagcagtgatgctctctgtcattggtcagcagaggttaggcccacctgtcaggcctcagaagagcctggcaccgcccacagggtggatcaacgggttaataagtcacagcagaaaacctgaggctcgactttaaataaacagaactctcccagctgcatccctgccaaggcccgagagtgacactggcacatgagctatatctccccccaccaacacaccccatgggctgtcatgagaaacactgcatataccagaacccatttactctgggacactctccacggagccctgccaccacctgtccagtggacagggcctgagggacacaaagcccccacagccctgagcacccgaggagccacctggcctggggatgtgtgatgcctgcgcacaggaggctctcagcccacagctccagcagaggaaaaaactcttgccttgtggagacaacccaggctttgactattctgggctgccagggctgtgggagcagcaggtcaaggttcaggacatctcaccctcctgccatcatggccaaacctcaggcgactgagaacgatgggcaacttctgtgtgccagagggcagtgacataccaggacatcaggggaacacaagccactgtcccgtagcccccactcctctcccatcctctcctcccctcccctctcctctgtggtgtgctttcttctgcatctgccacagctcacccaacagcaaatgcaatcccaactagttaggctcttgttaggactgaagatagcttttgctattcttctctactcaattcttcatcctaaggatgctgtggccagtcacaccctcccacgggcaagggcacccggcaataagccccagctactgccattactcatcccacttcccaggcaggcaggaaggcaggtgtgcagagcactgggcagggccatagtacctgtgccacacacacacatgctcttcacctcatccagagtttcctaggttttggtgcttcaacagccctcagtaacgcaggctccttactatgagatagcctgggagagagctggggtttctgtgatgggaaagggctaagccgggaaaggaaacagtgtgtgactggcgccttgcaagccacctaaggcaccaggcacacacaggggaggggagaagaggacgggagaggagtgggggccacgggatgcggcttgtgttcccctgatgtcctgggacacagctccctgaaccccaaaacaccccacggacaggaaagcaaagtaaggagaggtgaatgtgagttgcaggaggggctgcaggcactgacctgacctcccacccacaggatgaccccacacagcagagggagaaactgaggcccagagggtggcaccactgtacagtcaggtacccccaccctgtgtcctgctctgtactacacagaccacccagcacacatgtggccaataccagtgaggcaaaggtggcagcctgggccccccatgctggccctcagccatccctgggacaacagtctagacacccagaagctctgcacctaggcccactgacccagcctccctccaagccctgggtgcccatgtgtgcccaggctgctgcccctggcactcaggccatgccacacgcagcagctgggtctgaagcctggcttggaaccagccccccacagtcaacatggagacagccctgctggcaccgccccaggcctgggccctgtctcccgcaccctccagcgacctgcctgggccaccctcaaggtgcgcctgctcctaagccgcctcccacagtggagggacacccgggctgcttcagagcagactgtggcaagttaccctctcccccagggggaaagggatccaaagctcctgtgcctctggggtgcagcatcagcccagacttctgctcggctgggtgccatggctcacgcctgtaagcccagcacattgggaggccaaggcaggaagttcgtttgaggtcaggggtttgagaccaggctgagcaacacagggagactctgtctccatataaataaaaaattagccaggtgtggtgccacgcacttgtagtcccagctatttgggaggctgaggtaggaggatcacttgagcccgggagccaaggctgcagtgagctatgatcacaccactgcaccccagcctggatgacagagcaagacctcgtctgaaaaaacaaaagcagacttccgttcaacagcatgtgaacctcaccttgcacacctaggagttcgttaccctcctcagctcagagattagagggaactctccccacagagatgctatgatcagagggccagggaccctgtctcattgatcctacgctctacgccagacatcgcctcagaatccttctcaacacggctccacttcctatctacaaggagctggcctacaagatggaagcgattcctacattatggggtcatgtggctccaggcacatggccctcgaccagtgggagcctgtgcacaggtaagagagccagggcagcctggagatgagctggacacaggctgccagcactggctgtcccctcccacttgccaaatccagtgtgagctgagcacatttcactggaacaagcaggcgtctgagagcatccaactccaaaaatagtgccaccaggagaggaaggaacacgctcttctagctgcacccgctccctgccctcagatacctccctgcacagtctgtgcctggcctgtggcagttcaagggtcacacccaactctgaaaagggagagataacatccccagataagaagagtgaaaacaggccaagtctgctgccagagcctggccacagacccacagccccttggcagagaactgctcaggaagtcctcctctgagtctttcaagccactggtatctaacaaagaatctaatctgcacacggcacttgccccgagctaagaaagttctggaagggtctcctaggtctccccagcccaaggtgagcttgcttctgtggagggagatgcctgcctgcccatgtccaccaccactgcacaccaagccagtctgaagccaccatgatctggctgttgctggtttatggtgcacctccccgctgcgaagaagtgggccatgtgagcgcaggggcttcatccctcctgcttcttactggagaaacactcctggaggcagccgaaccctcactgggtgcaatccctctgtgtaggagattgcactgtgtaggttgtgccccgccgaacaaccacgcagctgaggctcagctcagagactgcattcagagcccaactagaatcagacacaggttctgcgggccccactacccatctggaggcagacgcctgacccccagctccatccccagagatgaggatgcagcaggctgaggctgactccatgcggcagctgctcccaactccacaagggacacacaagccagcccttcccatccaggctgcacatgactgtgttttgtttcaaaggtcacatacaggtcacaaataaagaggccggttcccactggaggctatgtcaggattgatgcagtccctgagaaaaactcccggaaaacccagggactcccatgcgggctgagaaacattttgagtttgcatgagatcaaaataggagtcacagctgagtgtggtggctcacgcctatagcactttgggaggccaaggcgggaggatcacttgaggccaggagttaacagactgcagtgagctatgatcacaccactccactccagcctggacagcacagcaagaccctctctctaaaaaataaaaacaaaaatagaataaaataaaatacaatacaagagtcagcagccaggagggtagcctgtcccagagtggatgccctcaggttcaaggtttgacatcatctgcactaactgtgtgatctcaagttagccattatcttctagatgtcccattagtgaaataaaggggccagaacaaaaggaccctccaaagtctcaactggccctggccaacagcaaggcttcacagggctgcctggcactgcacaggggcctgggagcccaaggcccgagcctggccccacgacagtggttccattaacacaccaactcttcctgccacacacccagctggacaccctagaccagcggccagcaagcttcttttatgaagggccaaagagttggtatttcaggctttgtgagctagacagttgcagccttggctgccgtcacagggcaagagcagccataaattacaggtaagcaagtgggcagctgtgtccctataaaactttatttacaaagacaggtggcaggccagacccagccctttggccacagtttaccaacacgctatagtctctagggttgctgctgaaaaagatcacactacagcccactctgtccgcgtcctaacaaggcagcaagccttgttgtggggataagcaactatagcagtgaccctgggcagagcctataggcctcagtttccttgaggacacaaaaagagaccctgtgagtcacctctaccactaattccatggggaaatggagcaaacatgaggtggacgcagcccaggttcccctcaagatctcgggaataatatttcagagtagccgtgagcaggaggcacccaccagggcccttccccacagcagccaggttggaggtcctgtgaaccaggcgccctgatgcaatccagcaggcatccttatcacagtgcccactgagaccctaaggtcactccctccaggtgtaggggctacaagatccacagcaggaagctcattgtaccccgaaaagtcactgttttcagaaaggaaaaaggaacttcccaacccagcttaccctcctcaggcctgtgggaggagacaaggccaccccaagccctttgggttcctggtggggagtcacccttccgaaagaagggcaatgtgatggggtggccgcccccacccggccccttggcccacaggcccccactaatcagcctaccctggatagaggggcccaacctaaggtctccagggtgaacacagatggagacacaggccaatgcacgtgcgcgcgcgcgcacatacacacacacacacacacacacacacacacacacacacacacacacacacacacacacactcccctccccaactggaggcctggggctcctcctggaagtaggtggattccacctgcccacaggatcctaagaaaactctgctcctcctcttccctcccacccaccttcagcaaatgcctcagggctaggccaagggcagcagctggacccccccgcccagccagtgccccccagtgggctgtccctgacctgcaggacctccaggccacttctcacctggaagagacctcattttccacaaaagcttaatccaaaaagggctaaaaatagagattctgcacccatctgagctctttgcctgagaagggccctgaagcctcagtacctgcagggctcagaagtcctgccactgagaggctcaaccaccctggccaacctcacccaaggcccttcctaaccctcactgcttacagaaacccatgtcccagctgggcacgatggctcacgcctgtaatcccagcactttgggaggccaaggtgggtggatcacttgaggccaggagtttgaggccagcctggccagcatggtgaaaccccgtctctactaaaaacacaaaaaacttagctgggcattgtggcgcaagcctgtaatcccagctaatttggaggctgaggcacgagaattgcttgaacctgggaggtggaggttgcagtgagccaagaatcacaccactgcacactccagcctgggtgacagagtgagactcggtctcaaaacaaaaagagaaacctgcatcccaacacaggccgggcaaccgcacactggctatgcagaagcagggcacgtagccactgtcatctccactcagccccagcttccctcactgcagagccacaccgggctctccctgtccctttctctcacctgagcccaggtgatcctgctcgagaccttcctctgtcacctgtgaccaggtgactcctgggtccatccaggggcatcagaggccctgcaggtcctagctctcacaggacagtcacatacatgagggcatttaaatggctccaagaccaccccacacccattaagatggctaccatcaaaaaataaccagttcgggcaaggacgtggcgaaaccacaacccttgtgcacggctggtgggaatgtaaaatgctgcagccgctgtggaaaacaatctggcaaatcctcaaaaaattaaacacagaatgaccaaatgaggccgggagcagtgtctcacacctctaatcccagcactttgggaggccgaggtggacagataacctgaggtcaggagttcaagaccagcatggccaacatggtgaaaccccgtctctactaaaaatataaaaattagctacgcatgggccgggtgcggtggctcatgcctgtaatcccagcactttgggaggctgaggcgggcagatcatgaggtcaggagatcgagaccatcctggttaacatggtgaaaccccatctctactaaaaatataaaaaattagccaggcatggtggtgggcgcctgtagtcccagctactcgggaggctgaggtaggagaatggcatgaacccgggaggtagagcttgcagtgagctgagatagcaccactgcactccagcctgggtgacagagcgaaactccgtctcaaaaaaaaaaaaaattaacttggcgtggtggtgggcgcctgtaatcccagctacttgggaggctgaggcaggagaattgcttcaacctgggaggcagaggttgcagtgagtcaagatcacgtcactgcactccagcctcggcgatccaacaggtctacttctgggtatgtatccaaaagaactgaaagcaggggtttgaacagatacttacatgccctgttcacagtagcatggttcactacagtcaagaggtggaagcaacccaaatgcccatggacagaggaatggatgagcacgatgtggtccatccacaccacaggacatcagtctggttccctgcccactgcccaccacccaccataccaccggagggggcctgatggagaaggtggaagtacagggggccccagctccctctgacagtgctgtgggctttccagtgggaaaattgctaaagaaaccaggaagctggccaggcacagtggctcaagcttgtaatcccagcattttgggaggctgaggttggaggactgcttgagcccaggagttcgagaccagcctgcgcaacacagtgagaccctgcctctacaaattaaaaaaaaaaaaagggccgggcacagtgactcacgcctgtaatcccagcactctgggaggccgaggtggatggatcatgaggtcaggagttcaaaaccagcctggccaagatggtgaaaccccgtctctactaaaaatacaaaaattagccgggcatggtggcagatgcctgtaatcccagctactggggaggctgaggcaggggaatcgcttgaacccagggggcagaggttgcagtgagccaagatcatgccactgcactccagtctaggcgacagagtaagactccgtctcaaaaaaaaaaaagaaaaaaaattagttgagtgtgatagcatatgcctgtagtcccaactactggggaggctgaggtgggaggatcgcttgagcccaggatgttgaggctgcagtgagctgtgatcacgtgattgcactccagtctgggcaacagagcagaaagctccgtctcaaaaataaagaaataaaaataaagaaacaggccaggtgcggtgactcacgcctgtaatcccggcattttgggaggccaaggcgggcaggtcgcttcagctcagaagttcaagaccaccctgggcaacatggtgaaaccccatctctacaaaaacatacaaaaagcaaccaggcgtgatgatgggtgtctgtagtaccagctatttaggaggctgaggtgggaggattgcttgagcctgggaggcagaggttgcaatgagccaaaactaggaagccagttctctatttcagaaaaaaaacaataaaaccctaacagcagagctataggagaagctattttaaattttggaggctttgctttctgggatcattttttgggtcaacgaggagagcagctgacacctcgtgcacagccagggagaacaagcctgtctcacctctaggacaacaccttcacctgaattgggaagttgaggctcagggagggtgccagcagcctggagccccaaattgtcagtgggagcagcgccaccaatgtacctgatccccaatatgcagttctcagcatccttcaagagagacgcctctttgtgaaaacattttcaccaacatataaaaaggacacggggcgcaacaacagcatctcatgaagagctgaggcccccgatgggcctgggggaaggacaggggtgttaacagtagggtatatacttgcggtctccccatctgaagaacggtgagaaggactgaccacagccctccatcaccagcagctcaatttgtccaaagaggagcaagccaagcggggctgagctgccttccctggcctcaaaatcgcagcctcatactccaggctccactcacagacacatgggcatgccaggccgtggcctgtgctgggtcacctgcctcacctcacctcatcgctctatgtagcctcactacgggacagtggactggcctgtacacacacaaggcctgcagcatccggacatccccagaaccaagcatagtgccaagaacacaaaaatgcccgaagaatactgacctgtcaggctccacgatgcacagaaggtgcagcattaaaacataaagtgttcagggaagaagagacgcaaaaccatatgattgtgccactatgacaacacggtacacccaggcgagacagaggagggtgcaaaggtgtcaacagaaattacctggggcaatgagaacagacttgctaattttaggtacattgcaggctttctaccctgagttatactgcttatatagtaaaaaggaaaaaaaaaacttcacaggatgcttttaaaacaggagttcaggctgggcccagtggctcacgcctgtaatcccagcactttgggaggctgaggcgggcggatcacaaggtcaggagatggagaccatcctggctaacacggtgaaaccctgtctctactaaaaacacaaaaaattagccgggcgtggtggcgggcgcctgtagtcccagctacgcaagaggctgaggcaggagaatggcatgaacctgggaggcagaggttgcagtgagccaagatcacaccactgcactccagactgggcgacagagcgagactccatctcaaaaacaaaacaaaacaaaacaaaaaaatcggaattcagttattccacaaacttgaccagaactcgaagccctaccccttcacaaacacatctgctggcctggctgcctcagtcaggagccgtgtctccacttggtcaggagggtccagccctggaggatataattagcatcagactctggggcccactgccaggtcagatggaggcgggaggtctctaggacgcttttatctgggagaatagtctccctgcggatggtttatttggacaccagcttttttcattaaaaagcaaagtgacagccgggcacggtggctcgcacctgttaatcccagcactttgggaggccaaggcaagcagatcacgaggtcaagagatcgagaccatcctggctaacacggtgaaaccccatctctactaaaaatacaaaaaaattagccgggtgtggtgacgggcgcctgtagtcccagctactcagaaggctgaggcaggagaatggcgtgaacctgggaggcagagtttgcagtgagctgagatcacaccactgcactccagcctgggcaacagagtgagactccatctcaaaaaaaaaaaaaaaaaaaaaagcaaagtgacaaaataaccacatgtcatggccatctctgtcattcactgcacctgcaggtcacaggccatttggatgcattgttctacatttccctttggactctgtggctgactacacaggtgagattgaagacaaccctgtccatgagattcagagaccaaggagaaagtgtaacaactgaattcatcaaggcagaaagcacaacggggagcaagaccctaaaacaaaggacacagaagaggccaaacccaaaatgtgcagtatcaatcacaagtctgtgccctgccaggtgccttaaacaaggctgatgccccctgagaagcagacctctgaaaactagggtctcttccctgggcagctgcttcgagcccagggctacgtggagcagagaggcaatcctgtttgtcaggctggcgggttcctccctcaaggtctcccagtcgggatgtcacaatccgggtgtgatgtcaaaactgcttcaaaggtgatgaactacggccttggccgtgagtcaacagaggggtgggtttccgagtgagcgctgcctgctgtttacacacaatcacagccacggcaaccagctgaaagcacagtcaagggtcacgatgccgagtgcagagctcagtccctcacacacactcttgcctgcctcctgcagagactgccagctcgggcccacagactcaagctggcttgtcctcttctagcaccttctgggagaatccacccagaaccaccaaatgctcaccttgaaacacacaggcaaaccataccctggtgcaccagtgggccactcctgatgcctcctggcagcccacctgttccaccccagcccatccagcggccacagtccttcagaggtggcagagcccaggccatgacacttggattctgagttctcagctacttcccagctgggagatcctgcctggtgattcagcctcctccagagtctccacccatatcctcacctaagaaatgggaactgctcccaccacggggaagatgggatgaaatgcagtactgtgggtggcacagccagcactggcggggtggggcaccctccacaggtgtaggtgcccatcacctttccactttcttgggggagggggtccagcatagccagcaaccggaggaatctgctcagtcactcacgtcaccaaggttcgggcctcttggggacgcggaaagttgcatttaagtgaggctcaggaccccagtgtgactccccttcaggtcaagacccctgcaacctcaaaagatagtttggcttgagcactcaagaggcagtatgggccagtgaggacagccgagcacccttggacaggtgatgccgcctctcagagcctcatctgtccctgtcgtgaagggggaccataaacttcctctcccggcaagtggtcaagatgatgtgcacccatgggaagggatgggggtctagcccagggccaacaggggcagcactagcactaggtctctaaagaaggccttctctgaaaagcaggcagggctggcaagaagctgccctgctcagaaccaaggggggtgcccaccgggaagggaagataagtcgggcctctggggccctgctgtgagaatggatcacaggctgaagtaaggctcctcctgccaccggtgccaagggtgacatccacacagcccacccacttagcagcagacagtagcccccagcacagctccagggccacccagaagagctgagtactggccacaggcctgaggcacagcacccctctacctccactcccttcacacccttccctgcgacagcacaccggccatgcctgggacccttcccccagcagactgcagctccgtgtcacctgctggaagcactcactgactgccccacctatacccctcaccatcattaacgttgaccgccggtgagttactcttgctaatttctgtgccatccttcctgttcatgaattctgtctcctgccactagaatgtcagctcgtgacatgaggggcccatctcaatcactggtgggtatcccgccctgagccatgggcactgaccagaggctcaatcataccaggttagatgagtgatctggagtctcccaccggctctgtacgaacctccaggcagggaccagccccccaggagccagctctgggtccattcactaagggctcagagcacaagaggggtcaggttattctcctcccaagaggaagagaatctggaactcagaaagggtcaggcaccaggatcctcacagccctgagagaaggatctggaacttgagggagcaggtcaagtactgctgaccccagttctgagaaggattcggagatgggaggggtcaggcactcacccatggcctcaggaggcaggtggagctgagattcaaatggagagaggctctaatccccaggcctcctgaagcacttcctgggccctcatttttttctgaacaacggtgtgctcctctccaccaaggagcttgtgatccaaaagaggtcactcagcaacagagcccatgcaaacacctaatgatgaactacaacccaagtgcccctgggagggtcacttcctcagactgaccagaggctacttttccaagcaggtgagtaacactgtcctggaaggagggggtgtgtccatgcttccactctcccctctcccagaaatcactcatcagagcaaaccgggagatccacaagaacagccacctcacaacccatgaaggtttcgttttgttttttgacacagggtctccctctgttacccaggctggagtgcagtggtgcgatctcggttcactgcaacctccatctcccagattctcctgcctcagcctcccaagtagctgggattacaggcatgcaccaccacgcctggctaatttttttgtatttttagtagagacaggttttcaccatattgtccaggctggtctcaaactcctgacctcaagggatcctcccacctcagcctcccaaagtgctgggattacaggtgtgagccaccacgcccggccatcccatgcaggtttttatattcaaagaaaaacagacacgtagttcatgcctgtaagcccagcactttgggaggccgacacaggaggatcccttaagcccaggagttcaagaccagcttaggcaaaatggggaaaccccatctctacaaaaaaaaattttttttaattaaaagaaaaagaaaaaaactgggccaggcacaatggctcatgcctgtagtcccggcactctgggcagctgaggtgggaagatcacttaagcccaggagttcaaggccgcagtgagctatgatcacaccactgtactccagcctgggtgacagagtaagaccttgtctcaaaaaaaaaaaaaaaagaaggagaagaagaagaaaagaaaagagaaaaactaggccaggcacgaaggctcactcctataatcccagcactttgggaggccaagggaggaggatcacctgaggtcaggagttcgagaccagcctgaccaacatggtaaaaccccgtctccactaaaagtacaaaatttgtagggcatggtggtgcatgcctgtaatcccagctatttgggaggctgaggttgcagtgagccaagataacaccattacactccagcctagcaacaagagtgaaactctgtctcaaaaaacaacaacaacaacaacaaaaactaggccaggcacgatggctcactcttgtaattacagcactttgggaggctgaggcagggaaatcacttgagccccggcgtttgaaatcagccttggcaacatagtgagaccccgtctctacaaaaaaatttaaaacttagccaggtgcagtggtgcacacctgtggccccagctactcaggagactgaagcaggagggtggtagttcgaggctgcagtgagctatgatcatgccattgcactccagcctggacaatggagcaaaaccctgtctcaaaaaaaaaaaaaaagggggcccagcgtggcgactcaagcttataatcccagcactttgggaggctgaggcagatggatcacttgaggggtcaggagtttgagaccatcctgaccacatggtaaaaccccatctctaccaaaaatacaaaaattagccaggcacggtgatgcgtgcctgtaatcccagctacttggtaggctgaggcaggagaatcacttgaacccgggaggcggaggttgcagtgagctgagatcacgccagcgcaatccagcttgggcgacagggcaagaccctgtctcaaaaaaaaaaaaggaaagaaaaactgcacaaagtccaaggtagagtgagaaggccagcagctatgtgtactgctgcgcctttaccttccaccacgctgctccagctggctaccaggtcaacaccagagccctctggggagagaaaacaggagggcttctacctgggctgttcccagagctaggattacctgctcctgggagccacagagaaagttccacagcaagttcctttctagcccctgccacacctgaatttgtaaaagcctcttcacaattaaaaactaaaaataggccgggcacggttggtcacgcctgtaatcccagcactttgggaggccgaggtgggcagatcacaaagtcaggagatcgaaaccatcctggctaacacgaaaaatcgcaccactgcactccagcctggacaacagagcaagactccgtctcaaaaaaaaaaaaaagaaattaaaaataaaagccctctccacaagttgcaattggcaaactatataaccacagcatcgaggaatacaaaactctggcttctgggtgatagagttgtccacatgagagtttgtccataaccagtatatttctctggttacacaatcaagttcttcaagccaccttcctcaagctcactacccaaaaccacagagagcacggagctgccgtgccttagaaaagtccatccactatactgccccatgggcaagattaaattcgaaagtagccaagctggctgggagcagtggctcatgcctgtagtcccagcacttttagaggctgagaaggacggatcactggaggtcaggagttcaagaccagcctggccaacatggcaaaaccctgtctctactaaaaatacaaaaattagccgggtgtggtggcacgtgcctgtagtcccagctactcgggaggctgaggcaggagaatcgcttgaacccgggaggcagaagctgcagtgagccgggatcgcgccacctcaatgaagcctgggcagcagagtgaaactccatctcaaaaaaaaaaaaaaaaaagaaagaaagaaagaaagaaagtggccaagccacttaaattaccagacagctttttgagaaaaatccaagtttgaatcaccccaaaatataatccagccagccaagttgctctggatggcttggaaaagttcttctaggaagcccctcctggctggtcaacacactgccctacacagctgggctccgagccagaggagtttaacagtccacagttaccttcaccctaacatgaggaagatccagcttagagaggggatgtaaccaataccctaaagtaaaaatagcagtgtgacagcatgaggtggacacacaggcggaccttctggactgaaaagcaagcgagggcagcatcagagagaaggcggagctcctggttcctaaagcacagaagacagtggtgaccaggtaccaagtccatcgtagttatatgactcacgagctctcccccagctgtttctaggaaagcctgccttcctgcaggacaagtcagaatcgctcagggaaaaagacccagggccagaattctaccaggaagagaggctctggctggtcatgggccagcagctgctgtcgctgccactgtctcctcctcacctgcaggggcgccttagcctcatcttggggagtctttttgacaaggtgcgaacttgctctttcaaaaaaaaatgaaatcctcattccatgaaggggaaaactgcgacaccgggacagggaggaaattgcccaaagacatgggaagaagcacggaaggggtgggcaccgggagagtggtggaaacgaaacagggggaagaaattctcggcttagctaatggagctgaacaagttcggggcaggaagaaagccacattccttcctagttagtctccctcctcccccgcccgcggcacccccccacccccaccatcaacagtatacacaaacacacacacacgcagggagcagggctctctgagcccgagactagacccacccccactccctttagggcaatgaagcccccaatttccagaaaaggagttacaaggttcctaaaccacttcccctcgggacctgaccactggtcatctgcaacttctgacccagcacagacggggggagggggggccatgacacaaacagaaatgaaaaaggcaggtttctgaccacggccccagatgcgccccaaagtcaggcccaagagaacatacacagcagcctcccctccccaccaccagccaggtggcagaaccgaaacgcctcaaacttcccccagatgggcccaaatcggcctctgagaagttccagagtcagcggccagatgtggtagccagagcttcctcctgggtggcagggatcccctacatgtgccctgaggataacatcacagccgcccccaacacttccactctccaaggaacctctctccggagagagagggtcacctgggggtaaggggagcagaaagctgggacaagctgtcagtttctgcccaaactccccgtcccaagaaccaaagtggcccaacctgagtggcttcatcggaacgcgtcaaagccagcccccagctgcaaagccttccacccagacagaacagacccccacaagtgcctcgctgaccaccccctgccgggcacccagacgatcgctgcttcccaggaggacagacacagtcacccccaccaacggcgctgccccggccccagatggaaaagcccccagcttccccctatcacggtgccgggaccgtgcggcccaccgcctcctcgccccgccgccaggtgcgcaaactggaccctgcccaggtgcccagcaggccagaaaggccccggacgccgccaggtgccgacaccgacgccccccgggcccggcgcgcgagtctgggcccctcagcagccccgggccacccgcctgtattgcctcctagtgctgagaaggaacgcggttctcagcgctccaggccggactggcgcccactccgcgccccgccggcccagggacccgcgagcagcaccacagacctagcgtctccgagcccggacgcctcagtgaggggagcgcgaggccggcccgcgtccggacgttccccactggcgcgccgggcgccatgccactcacctgtctggcgcggtagctctcgaaggccctcagggcactgtcggtgagcttcacgtggaacaccgacaccttgctgccgtcgctaacccgcccgcacgacagcccgtagctcctatcctccttcagcgccgccatcttgcgaccatctctcccccgcgcccccttcccggctccagcgccgccacgccggccacgccccgccccgccgcccgctgacgcgctgcattattcatgagacgcggctggccacgccccccgagtccgaccaaaccaacagtcgccgccacaccggcaggcagcgcactacattattcaggagacgcgcctggccacgccccatgagggccccacaaggcccacagtcaacgccccaagttgttgcatattcataaggcacttatggccccgcctcttcaggccctaggggtggccacttccgtgaacgaactccgcctcaacacgcgcacccctccaggccccgcctccatagtattatacataaccctgactcagccagccaggcgcgtcaaagccccgcccctacagccgctgacgtgatgcattatttatgagatctctacagtcttccgtctttggcttctgtggaaagccgcagagagggcgtggaggggcggagccggctcgaaacacgtgggtgggtaggccccgccgcgggccgggagggtgggcgtggctatgtaaacggagcgcgcgcgttggacgctgggttggacacataaggcatcccttaggcggggtggatgggacttccacccagggaaggtgctggaccggtaggtggaagaggagctggtaaactttttcttatgagatgagtacttttaataggataaaatcctacatccccacagtccctgagcgatggtgcagtccagcttcattttcctattttaatttttttttgaggggtcttgctgtgttgcccaggctggagtgcaatggcgccatcatggctcactgcaccctcgacctcctgaactcaaactgatcctccttgtctgggtctgctgaaatgctaggattacaggagtgagccaccaagcccagacttccattttcttttcttttctttttttttttttttgagacggagtcttgctcatcagcccagactggagaacagtggcgctatctcggctcaatgcaaccatcgtctcctgaattcaagcgattctcctgtctcagcctctcgagtagctgggattacaggcgcccgccatcatgcccagctaatttttgtattttagtagagatggggtttcaccatgttgaccaggctggtcttgaactcctgacctcaggtgatccgcgcgcctcgccctcccaaagtgctaggattacaggcgtgagccacctcccccagtttttgtttgtttgtttgtttttagacagagtttcgatttccttgcccaggctggagtgcagtggtgtgatctcggctcactgcaaccaccgcctcctggattcaagcaattctcctgcctcagcctcccgagtagtagctgggactgcaggcgcccatcacaacgcccagctaattttttgtatttttagtagagacgggatttcaccatgttagtcaggctggtctggaactcctgacctcaagtgatgcacccacctcggcctcccaaagtgctgggattacaagcatgagccactgtgcccggccagccttccattttctaaaaagcaacttcattgagtcacattttacatataaaatatattcccaatgctgtgtagctgtcaccactatctaatttccgagatttttttttctttttctttgagacagagtttcactcttgttgcccaacctggagtgcaacggtgccatctcagctcgttgcaacctccgcctcccaggttcaagcgattctcctgcctcagcctcccgagtagctgggattacagatgcccaccaccacgcccagctaatttttgtattttcagtagagacggggtttcaccatattgatcaggtctctaactcccaacctcaggtgatccgcctgcctagggctaccaaagtgctgggactacaggcgtgagccactgcgcctggccaagggaggagctggcttggagggccaaccagctcgctctgtgatcttgtgaaaggcacctcctgcttctgagcctctgtggattcacttcggaaacaggaaacagcaataagagcagtactcaggacctagcaaggtgtctcacacctgaaatcccagcattttgggatgccatgacgggaggatcgcttgcacccaagggcttgagaccagcctgggtaacagggctaagccccctctctacaaaaaaatttaaaaaattaaaaaaattagccgggcatggtggagcacccctgtggtcccagctactccggaggctgacatgggaggctctctcaagcccatgggaggttgaggctgtagtgaactatgttcgcaccactatattccagcactccagcctgagtgacagagtaagaccctgtctccaaaaaaaaaaaaaaaaaaaaaaaaaaaaagccaggcccccagtggctcacgcctgtaatcccagcacttttgaaggccgagggggctggatcatgaggtcaggagttcgagaccaccacgaccaacatggtgaaaccccgtctctgctaaaaacactaaaattagccaggcatggtggcacacgcctgtaatcccagctactcagaaggctgaggcaggagaatagcttggacccaggaagcagagcttgcagtgagccgagatcgtgccactgcactccagcctgggtgacagagcaagactcggtcccaaaaaaaaaaagtatttctccacgtctactttacatttgattccccagtggatctcaatgagaccccaggaaaaataaggcagaacttatcagacgttggcatgctctgcagaagtttcttttttttttttttttttgagacggagtctcactctgtcgcccaggctggagtgcagtggcacaatctcgggttcactgcagcctccgcctcctgggtccaagcgattctcctgcctcagccgcccgagtagctcgggttacaggcacgtgccaccacgcctggctaattttttgtatatttagtagacggggtttcaccgtgttagccaggatggtctcgatctcctgacctcatgatccgatgatccgcctgcctcagcctcccaaagtgctgggattacaggcgtgagccaccatgcctggcctttttttttttttttttttttggagacaagttctcactctgtcacccaggctggagtgcagtggcatgatctcggctcactgcagcctccaactcctgggctcaacccatcctcccacctcagcctcccaagtagctgaaattacaggcatgctccaccatactgggccaatcttttgtattttttgaagagatgagatttttccatgttgcccaggctggtctctaactcctgggttcaaaagatcctgtcgcctagcctcccaaagtgctaggaagtgctaggattataggccataagccactgcacctggccgtctgcagacatttttgtttctttgttttgagacggagttttgctcttgttgcccaggctggagtgcagtggcacgatctcggctcactgcaacctctgcctcctggttcaagtgattctcctgcctcagcctcctgagtagctgggattacaggcacacgccaccacacccagctaattttgtatttttagtagagacgggatttcaccatgtaggtctcgaactcctgacctcaagtgatccacccgcctcggcctcccaaagtggtgggattacaggcgtgagccaccgtgtccggctttgtctgcagaaatttttaagaactaggttacccatggccaggcatggtggctcacgcctgtaatctcagcactttgggaggccgaggcgggtggatcacttgaggtcaggagatcgaaaccatcctggctaacacagtgaaaccccgtctctactaaaaatacaaaaaaattagccaggcattgtggcaggcgcctgtaggcccagctactccggaggctgaggcaggagaatggcgtgaacctgggaggcggagtttgcagtgagccgagatcgcgccactgcactccagcctgggtgacacagcgagactccatctcaaaaaaaaaaaaaaaggaactaggtcacccacaatattgcaagtgagttgatcaccctggggtgccccccggacacatagtccacctggtgagctctctgatggaagcagtgaccccaccctgccccttaccccgtgtgtggtcttggacacatcttgccatctctgttcctcagtttgctcatccagaaaacagggagtgtaacagcatctacctgattcttctgtgacaatgacatgagacaaggacatgtgtagctcgccctgttcaagtgttccagaattgtgagctcgcgtacacatacaaaattccttccgcagtgctcacttccaattcacagcccatggcaagtcgggtaaggccctcctgagtcactgctcaaggccaggtatatgggaggtgttagtaaatgctttggtatgaaagacaaagccatccccgtcgttctccaaaggtaccacacatggtccagctggcataccttgcacagctatgccatccacaagggatacccttcaccacccattaaaggcatcccatgccttcaacacaactgcagcgtcacacgtgctggatgctccagctcaccacccacaaccagctcagacctttgaggatgaagtggccgagtgaataaccacattcaatttcacactcctagtctggccattcggggcctctctcctccccgtccccgcaccatgtcataacttgcatgttctaggcagctccgggcctatttcttttttctttttttgagatggagtcttgctctgtcacccaggttggagtgcagtggcgcgatctcagctcactgcaagctccacctcctgggttcacgccattctcctgcctcagcttcccatgtagctaggactacaggcgtgtgccaccacgcccggctaatttttttgtatttttagtagagacaccacgttggccagaatggtctcaatctcctgacctcgtgatctgcccgccttggcctcccaaagtgctgggattacaggcttgagccaccgcgcctggccagcggggctatttcaactccagacattggcaccggcagtttgcttggccaggaaggacatttccttcctttaataaagcttttttaaaagtttatcaaacaagcagccaggagtagtggctcatacctataatcccagcacttagggaggcagaggtgggggaatgacttgaagtcaggagttcaagaccagcctggtcagcatggtgaaaccctgtctctaataaaaatacaaaaattagccgggtgtggtggcacgtgcctgcagtcccagctactccggaggctgaggtaggagaattacttgaacccaggaggcagaggttgcagtgagccgagatcgccccactgcactgcagcctgggcgacagagtgaggctccgtctcaaaaaaaaaaaaagtgtatcaaacaagtgagtgaaatattaactatcagtctcacatttagccaggtctaggctgcaattcaagactaaaatattggctgagagcagtggcacgtgcctgtagcccctgctacttgggaggctgcagtgggagaatcacttgagtgcagtggggtgggtcaatgctgcagagagctgcaatggtgccactgtactccagcctgggtgacacagcaagaccgtgtctctaagaaaaaaacaagactaaaatatcttaggagctcctggattgaagaaattctgtatcttaagatttgtatgctggccaggtgtggtggctcacgcctgtaatcacagcactttggaaggccgaggcaggcggattacgaggccaggagttcgagaccagcctggccaacaaggtgaaaccccacctctaccaaaaatacaaaaaaattggctggacgtagtggcactcacctgtaatcccagctactttggaggctgaggcaggagaattgctgaacccaggaggcagaggttgcagtgagccgagatcaggccactgcattccagcctgggcaacagagcaatactccgtctcggggggaaaaaaaaggatttgtgtgctacatgaacaggaaacaagttgactttgcattacgaaaagtcaagaggttctatatatatattttttggcgatgagtttcactcttgttgcccaggctggactgcgatggcgcgattttaggtcactgcaacctccgcctcctgggttcaagcctattcttctgcttcagcctcctgagcagctgggattacaggcttatgccaccatacccggctgatttttgcatttttagtagagatggggtttcaccatgttggccagactgttctcgaactcctgacctcaggtgatccacccaccttggcctcccaaagtgccgggattacaggcttgctatagggattctgaggcacaagaatcccttgcacccgggaggtggagtttgcagtgagctgagatggtgacactgcactccgacctgggtagcagagagagagaaaaagaaagttaatcaccaatgtggtgaaactccgtctctactaaaaatacaaaattagctgggcgtggtggcacgcacctgtaatcccagctactcaggaggatgaggcaggtgaatcccttaaattctggaggcggaggttgcagtgagccaagatgcaccactgcactcctgcctggatgacagagcaagactccatctcaaaaaaaaaaaggccaggcgaggtggctcatgtctgtaatcccagcactttgggaggccgaggcgggtggatcatgaggtcaggagttcaagatcagcgtggccaacatggtgaaaccccgtctctactaaaaatacaaaaattatctgggcatggtggcgtgtgcctgtaatctcagctactcgggagacgaggcaggagaatcgcttgaaccgtgatctgggaggcagaggtagcagtgaacaagatcatgccactgcactccaacctgggttacagagcgagactgtctcaaaaaaaaaaaaaaaaaaattagtcaagcttggttgcgtgcccctgtaatcccaagctacttgagaggctgaggtgggagaactgcttgaaccctggaggcggaggctgcagtaagctaagattgggccactgcactccagcctgggtgacagagcaagaccccatctcgaaaataaataaataataaaaaaaattggccaggtgtggtggcgtgcacctgtaatcccagctacttgggaagctgaggcaggagaatcgcttgaacccgggaggcagaggtcagaggttgcagtgagctgagatcatgccactgcactccagcctgggtgacagagctggcatgcaaaaaaaaaaaaaaaaaattagctgggtgtggtggcacatgcctgtaatcccagctacttgggaggttgaggcaggagaattgcctgaacctggggctaaccactggaaagagagcacagcctcaagccacactcagcctcaagtcatccaggtgacccagagaacaagggcctggaagaagcgggtgagtgggtgaggtggaggtgtagattggagtcctaggcctttgggaggccctccaacctcccttctgcaccaacttctcctgggtggctgtggcaggcagctttccctcctgggctgtaaggggatagatgcaggtgaggtgactgtagtggtctattttcaaggatgcccttattcttgggggcaagatggaacagcaggaagaaagggtgtgggtgctgggctgacagaggccccgatgctggctccgcccatcctggctgcactggtgagcggcatcataggagaagctcccagagtccagagttgggagagccagatgggatcagggaacctcccagcatcaaccctggcccttcctcatggcccctaaagccctgcagggtatggctctgcaggctacccagcctcatccatctggaatgcaccaggctagacctggccccagggtctttgtactgggcgtgctgttgcccagacctggggctgtcggcttcctgcatgggcagacccttgccatcgctgaaatatcagcgcacacatcccctgggagaggtcttcctgggcctccagctgtgccttctcacaggctgcatccagacattcacatcctctcccctggaccccatctgtctcttgttttgagatgaagtctccctgtgttgcccaggctgcagtgtagtcccatgatctcggttcactgcaacctctgcctcccgagtagctgggattacaggcatgtgccactacacccagctaatttttgtattttaagtagagctggggtttcactatgttgggcaggctggtctggaactcctgagctcaagtgatccacccacctcggcctcccaaagtgctgggattacaggtgggaaccactgtgcctggtgcactttttttttaaacatagatggaatctcactgtgttgaccaggctgggctcaagcgaccctcccaccctggcttccaaagagctgaaattacaggccatgacactacaccccacctctttattaaaaaaaaaaaaaggccgggcgcggtggctcacgcctgtaatcccagcactttgggaggccaaggcaggtggatcacgaggtcaggagatccagaccatcctggctaacacggtgaaaccccgtctctaccaaaaatacaaaaaattagccaggcgtggtggcaggcgcctgtagtctcagctactcgggaggctgaggcaggagaatggcatgaacccgggaggcggagcttgcagtgagccaagatcacgccactgcactccagccggggccacagagcaagactctgtctcaaaaaaaaaaaaaaaaaaaagagccgggcacggtgactcacacctgtaatcccagcactttgggaggcctaggcaggcagatcacaaggtcaagagatcaagaccatcctgaccaacatggtgaaaccctgtctctactaaaaatacaaaaattagctgcgcatggtggcgtgcgcctgtagtcccagctactcgggaggctgagacagaagaattgcttgaacccgggaagtggaggttgcagtgagcagagatcgtgccactgtacttcagcctggtgacagagtgagactccgtctcaaaaataaataaataaataaataaataataaaaagagagacctcactctggtgaggtcttccagcctaggctggagtgcagtggtgcaatcatagctcactaaagcctcaaattcctgtgctcaagtcatcctcctaccatctgtctcttttgaattcagtacatccactaggtaaagcaatgatgccacagaacccatgcagcagcctcaaggtagggcccactggggtcctggatttcaggtgagtaaacagtgaacgctggggtaacgagtggagctgggcagtaacacccccagagtccagctgagtcagacctctcaacccacttgcccctgctacatcaccccacttctctatgcctcagtttctcctctgtaaagtgagtatgttgtgcccggagaggagacccccagctccagctggctcaaccacatccaccatgctgtgtgactccagatgcatcacaggctgtctctggcccagccccagacagcgggagaagaaagctcaggagtccgtggaaactgcagggtgggatgctttatttcactgtggcggggagggaacctggacagggggcggcaggcggggtggggggctggcactcaggcggggactaggcaggggaagggctgcccccaggcctgttgaggagaaactgaggccagccctggcggagacctagcccagcggggtaaggagggtgggggaaaactgggtctgaaggaatgagggccccctccctctgggctttcctcctagagggcctcagtccctcctgctggctgggctgcacgacccccaatccttgctcccctaacccggaggagggggccagaccagggagggcagtggacagggagcctgggggagttggggagcgcagggcagggtccatggtgtgcagagggggtggcagccacctaggtggtcagttcctggcagcgatgaccacagagagtgccacaccccccaaggcaacagcagtcgccccaaacagccacttccatgggatggactgtggataaaaaggaggggagagaagggtggagggaggtcaagactggcctctggggcctcagctgccagcacagcccaaacagacctcccaacaaatcattgcctgactatgtatttcccacttcctggcaaactcctactcatgcagcaaaacccaaatcaaatggcccctcctccaggacaccgcccctcgtgccctggaagaggctccacagtccacccccagccctccagcttgagttccaccttcgactccactcatgatcacacagggctgggctctctccacgtcccctgcatcgcccaggacggcccagtctccgaggacatccatgtatgcaaaataaaatccctctgctaggcgtgccctgcacacagcccctgcccattctgtgccccagctcacccaggcacccttgccagggcacttagcaggcagccggctggggttgcccagcattttccggtacaaggcggtctccgtgctccgctgcgccgcatgcttcttcaccagctttgagagctctgcgtggatcgtctgcagaaggcaggggaagctgagaacacgcagcggccaacctgtcatcactggcgctctgccttactgggaccctaggctgtttgggtggtgggactgttgggacacaggggtcccatctgcccctttctgggcttagcaaagtcagggctgctgaccccatccctcctagggagccaattgatggcgcagagcacaaggtagccaggagacaaaaggttctggaaggaaggccaaggacactggcatggagcaggctggcagtgccctcagctgctggaggagtgagagcccagactgcctgtgtggccgtcatgagggtcttcacaagctgaccaggacccttcaggtacctactccgtgccactgcccaggtgggaacacaacagagagccacagcaagaaagacctggggcagaccgcaggagggacttcccagccgagcaagtcccagggcacccctgtcctgctcaccttgttggaaggttccagcttcagggctgccctcaggatggggatggcctcactgtactccccctgctgggccagcacctgtaaggggaagggggtggcatcactctggacccatacctgggcctgtccttcaagaaatccagcccaggaggttgcagtgagccaagatggtgtcactgcactccagcttgagcaacagagcaagactccatctcaaaaaataaaataaaataaaaacagcctggccaacatggagaaaccccgtctctaccaaaaaatacaaaaattagccaggcgtggtggcatgcacctgtagtcctagctactcaggaggctgaggtgggaggattgcttgaaccagggggcagaagttgcagtgagccgagatcacaccactgcaccccagtctgggtgacagagtgcaaccctgtcttaaaaaaagaaaaaaaaaaaagggtcgggcgcagtggctcatgcctgtaatcccagcactttgggaggccgaggcgggcggatcacaaggtcaggagatcaagaccatcctggctaagacggtgaaaccctgtatctactaaaaatacaaaaaaaattagctgggcgaggtggcgggcgcctgatagtcccagctactcgggaggctgaggcaggagaatggcgtgaacccgggaggcggagcttgcagtgagccgagatcgtgccactgcactccagcctgggcgacagagtgagactccatctcaaaaaaaaaaaaaaaggctgggcgcggtggctcacacctgtaatcccagcactttgggaggtcaaggcaggcggatcaagaggtcaggacgtcaagaccatcctggctaacatggtgaaactccgtctctactaaaaaatacaaaaaaattagccgggcatggtggcgggcgcctgtagtcccagctactcgggaggctgaggcaggagaatggcgtgaacccaggaggcagcacttgcagtgagccgagatcacgccactgcagtccagcctgggcgacagagcgagactccgtctcaaaaacaaacaaacaaacaaaaaaaacagccaggctcctggctactcatacaagtgccaaatggagctctggcaacatccctgggttccagccactcccaaactgctctcctagccctcaaactccatcagtgcacacttagcttggcattggtccccgcaacatgctcctccttcctgtctcagctgcagatctaggcacccacctcgctgcctcctccctcaccacctccactggcgagaggccgaatggatgcttccagaggttgttgttttttttttctctttcctttagagacagggtcttgatcggtcacccaggctggagtgcaatggcatgatcatagctcactgcagcctcaaactcctaggctcacacaatcctccagcctcagcctcccgaggagctgggactacaggcgtgtactaccatgtccaacgaattatttatttatgtatttatttataaaattattattactattgttattattattattttgagatggagtctcactctcgcccaggctggagtgcagtggcacgatcttggctcaatgcaagctctgcctcccgggttcacgccattctcctgcctcagcctcccgagtaactgggattacaggcacctaccaccaccggctaatttttgtatttttagtagagacagggttttaccatgttggccaggctggtctcaaactcctgacctcaagtgatccacctgcctcagcctcccaaagtgctggtattacaggcatgagccaccgctccaggcctacttatttatttattttattttagagacagggccatgttccccaggatggtttcgaactcctgggctcaaccaatccacctgcctcggtctcccaaagtgctgggattataggcgtgagccaccacgcccagcccttaattattttttaaatttttgtagcaatggggtctcactatgctgccaagactggtcttgaattcctgggctcaaatgatcctcctaccttggcctcctgaagtgctgagattacaggcgtgaggcaccacacctggccctgatgtttccaaagctttggccatagtgaatgattcaggaccaggcacatgacccaaatgagtcaatgagatccagcctgcactatgctggtgctgatgggagatgggttgctaaggggagaagatggagctgggcgaagtggctcacgcctataatcccagcactttgggaggtcaaggcaggtggatcacttgaggtcaggagttcaagaccagcctggccaacatggtgaaaccccgtctatactaaaaatacaaaaaaaggctggatgtgctcgcttgaacccaggaggcagaggttgcagtgagccaagatcgtgccactgcactccagcctgggtgacagagcaagactctgtctcaaaaaaaaaaaaaaaaggagggggtagaagatggaaatctgtaactttccaggggggaggggggagcatcatggtcaccctgagagaggagccggcccaggagggaaggtcagagcagagaaacagcatccccacaatattgtgagtgcctggatccagctatgcctgaagccagctaatccaaacttggcagttccatgagctatcgatccctcctttctgcttgaacctgtttgagtgggtttctatcaccttcaaccagcaggtccaaacttgtatgaagctacacaagcagccactcctgctgcccccaggaggatactacccccaggttgagaacaaagccttcaaaaacaggaactgcatcttctccctcttcatatttctctgcagaactccgcacacagtatgtccttaataaatcccagctggagggagccccacctcaggcttttcagaaacacagcaggtgagccagtatctgtgcctcagtttccttcgttaactgctaaaaggtcctgaaagccccacctaggggtgaggctgtgaggatgaacagaaaagggggtgagaatgaaggtcaagtctgtgcaagccagattcacccctatgttctgccagaacttttttttctgttctcgtgttttgtttttgacacagggtcttgctctgctgccaaggctggagtgcagtggtgtgatcaaggctcactgcagccttgaccttcggggctcaagccatcctcagcctcctgagcaactgggacgacaggcccgcgcccccacacccagctaatttttgtatattttgggtagagaagggggtctccctatgttgcctgggctcgtcgcaaatgtctgggctcatgcgatcctcctgccttggcctcctgtaatcccaagtgctgggattacaggaatgagccattgtgcctggcctctgccaggacttttactgagcacctactatgtacctggccctgtttgcaaggctggagatccggcagtgagcaagacagaccaaatctccacctttgagtaaggtagatggacaagaggcatgtcacctccacgtgctgcctgtcaggaacatctcagacagtcggcaatgcctacgcaaaggccctgaggtggagagagcctggctagacagcagaaagggagaatgccacgtgggatggagagaagcagaaagtgaggtgggagaagtgatagcaggagggggaagaccagacaactcaaggccccaagggctgtgactaggattccactttactctgaggaaaactgggacccatggaggttctatgggaggaggtttcaacactgggccaagccgggcacggtggctcaggcctgtaatctcagcacatggggagactgaggcgggcagatcacttgaggtcaggagttcgagaccagcctggccaatatggctaaccacatctctactaaaaatacaaaaattaactgggtgtggtggctcgcacctgtagtcccagctacttgggaggttgaggcaggacaatcgcttgaacccaggaggaggaggttgcggtggtgagctgagatcacaccactgcactccagcctgggtgacagagtgagactctgtctcaagaaacaaacaaacaaacaaacaaaaaacactgggccaaaggttggggacccaagactcgaggatcaaattctggcctcagccaatgaattgttgtgaccaggccacactcctgcacccgtctgggcctcagtttctccacctgcaccccacagagctcagctggcttatatacctatgcctttctcaaatgcagggttggggaccaccccgtataccccaggctgagtgacccggcctggcaccccggtgtggcctaccttgcccttgcggaagagagccttgatgttgtctggctggtgctccagcacaaggctgcaggagcgcagggctgcgcggtagtggtcgagcttcagctgcgaggccgccaggttgttcagacacttcaccttcaactgcaggagctgtgcctcctcctcgaacgtcatgtccactattgggagacagtgcccgccacggcagccgtcaccatgccaccagacaccccggcacccacccctctgcggaggctgcctctctggcctcagtttccccaattttaaccccggaccaagggccacgctttcctggggctctcctgaggaagctacaagatggagacttaagcaagcgagggcctagcctgtggtacatgtgaactggccctgtctatggtcaccccatccccatatccacttgcattctacaacactccactggtctgggatataccacgagtctgtaacaggccctagcttaggggcagttggggatctacccatattctgggctattctagaatattctgagtctgaggctctctggggctggaagtttctggcacggagtggacacctttgcaggggagatggtggagatctgacccaggcggtcacctttggcgctggaggtgatagccttgatggcgaggtcgtaggagttggcggccaggacgaagtccgcccgctggtagtgggcgttgccgcactcccgcttccggttggccagggccacgcgctcctgccccgtgagcatctccaggtcaggcccgtccacagccgtcttcagggtcacctccaggcacagggccgcgtgcggggggatgtatgggctcctgctagttgggtgggagcaggcaggggcagcactcagacctggtgacccctaaacccgctgggctggctaggaaggagtgagcttggctcaagcccccgatctgtctcccctctgccctccatcattccctcctcagtaaagtgcaggggaagtgacttgccgccttggagctgcgggacttgacgaacgagttcccctccctaagcctcggttttcctcctttttattaagagacaggttctcactctgttgcccgggctggagtgcagtggtgcaatcttggctcactgcagcctcaaaaacgtgggctcaagtgatcctcctgcctgagcctcctcagtagctgggactacaggtgtgcaccacacccagcttttttttttttttttttttttttttgagacagtcttgctctcttgcccaggctggagtgcagtggtgcaatctcggttcactgcaagctccgcctcccgggttcacgccattttcctgcctcaacctccagagtagctgggactacaggcacccaccaccacgcctggctaattttttgtatttttagtagagacggggtttcaccgtgctagccaggatggccttgatctcctgacctcatgatccacccgccttggcctcccaaagtgctgggattacaggcgtaagccaccacgcccggcccacacccagctaatttttaaatttttttgtatagagatgcggtctatattgcttaggctggtctggaactccaggtctcaagcaatcctcctacctcaacctcccaaagtgctgggatttcaggtgtgagccacctcacccagcctcagtttcttgtctataaaatgggcaagtagatggggtgagccgaggggtacacccactccacccatccccctcctgagacctgcagagacctaagggtggctgactctcacctgccttgggggccgtagcagtacttggagtcagcagtgaccatggccgtctcccccacgtccatgagtgggacactgagatccagggcctggggtgtgtggggatagccagctgtcaggcagactcagacccagcaaggcacgcccctcgcccctgccctgtcccgccccagcccgcacctggatgacgtcacagtcacccagagtgaacaccagctccggctcctcctgcacccgtgtgccattctccagcgacgtctgcagatgtacggtgaccacctggcccttgaccgggcggctcgaacctggcggccctgggaccagcgtcttcttcctcaacagcccgttccctgccagggtccagggacatgcagcctgtcacctggcagctcaaacaggcacccgctcccctgagcccccactcctaccctcagctctgcccactagctgtccagagggggctggcccaacactggggcacaaaccaaacttccaatggccactctgccaccagagtggggaaccccacgtgcaggacactgggcaggatgggacagacttcagggtgacagtgctggtgctagagaccagctcagtgaacaatggttggtctggtttttttgtttttttgttttttttttttaagaaaactgagacttgccgagtttccatctatttgagaggccaatgtgggagaatcacaagttcagcccagcgtctgggcaaaatggcaagaacccagtctccccaccctcctcaaaaagaaagaaaaccaaagctcagagaggacaaacagccctcaggctgaaatccttgccctgagatgtttgggcctcggtttacccagccatgaaatgaggtgctcatgggacctttggttagcagagcccctgtgacacagtgtccccaccacagcaccaagtgggatgaatttataagttaagcaaaggacacacatggtggctcatgcctgtaatcccagaactttgggaggctgaaatgagaggactgtttaaacccaggagtttgagaccagcctgggcaacatagtgagaccccatctctacaaaaaataaaaaatgaccaggcatggtggctcacacctgtaaccccagcactttggaaggctgaggcaggaggatcacttgaggttaggagtttgagaccagcctggtcaacatggtgagaccctgtctccactaaaaatacaaaaattaggggccaggtgtgctggctcacacctgtaatctcagcactttaggaggccaaggcaggtggatcacctgaggtcaggagttcgagaccagcctggccaatgtggtgaaaccctgtctctactaaaaatacaaaaatcagccaggcatagaggtgggcacctgtagtcccagctactcaggaggctgaggcagaagaatcgcttgaacctgggaggcggaggttgcagtgaactgagatcgcaccactgcattccaacctgggtgacagagtcagactctgtctcaaaaaaaaaaaaaaaagtagtaagatttttatcagtagtggtggtgatatttagtaatatttctgttccatcagtgtcaatatgattggaaactattgctacagtattgttattacaattgatagtggtaatgatatcttattatttgcatgggcaccagcattatttggtatattagatatcagtactatactagtagcaagacgtcttccacagaaaactaacatttctcttgttttcagttgctgtgatggggtatgttggggggaacatgtgggggctcatgtagttttcttcttgtaggattgctctgagcatttacaatactatcactactgtgaaccaaccagaaggctgaacaaaataacattcctctgatccacttgaccccagaacacattttttgttttggaagttggggtctcgctgtgttgcccaggctggcgtgcactcaggacacatttttcagagcccaagcatgtgtcagacaaatgccaaaaaaagatgcattgatggggttaggagctgccagcgcctggcgtgctggctgtgtggctctgggcaggtgactcagcctctctgagccactgttagcagatctgggaaacggggacacagcacattgtgcatgtgtgtgagtcagtggatagagtacatcaatgtgaagcatctccagtagttgcctctggctggtgatcacggtggtgaccacgtgacttccaaccctcacagcacagatggggaaatgaggctcaggggacgagagggccagggccaagggcaccctgatccacctttgctccttacccagaatgtccagccactcttctggggccggggctggggcgggctcgggctccatggcagcaaggaactctcgggccagggccccaggctgctcagcctcctccgccgggggttgtcccatgtcctccagcggtggcagctcactcaggtcatcctcttcctcctcttcctcctcctcttcctcctcaccctctgcatcctcaaccccatccagtacctcgaagtcctcgagcggtgggaccccggcgggcagtggggcagagggctcagagggttcagcacacgatgccatgctgctggggggacaggaattggccctggaagtggggggcagagatgtgggtcagaatcctacacagcccctcaaagtctccactgtactgattccccacactgccgatcactttctgtgtaactcaagggctccaggcctcagtttcctcatctatacagtgggtgtaacaacaaccccagcttgttgggagaaattaacccatgcatcaagcccttggcatcaggctcaaatagtgttagccattattagagctaattattatttaatgtttacaaatactccaggaagtagggaagattcccctcaacattttgcagaacaggaaacaggccagaggggcaaaggcatttgcccaaggtcacagagaaagccaaaggccaaaggaggatttgaacctggggcttcaggccctgtggctttgcctgattataagctgagcgaagggtgctgggatttttgtggagaggacagcctccgaggccttagggaagccatttttagagcctctaaggccactgggggaaattgaatcttttaccagggcctcccacctccagcctcttctccaaaggggagaccctccccaaaagcaccaactgtaatcacccagaaaccccaagcgttttttccttccacactctgaatctaacactatcccccacaaccccaacatcagggaccctggcccaaatccttccccaggagaccatcctcctctcatcaggcctcggtcccaccccctcaaagcagcctcctttccaggagtggtcgaggtcccaccacattctacagcctcttccttgccccagacctcctgaaccaataaccaacccctccgtcccccaggccccaagctcagaagagtgtggcacagccatcaaaccagcccgccgcatcccctccctaaccctcacctgcctgctcctcccgggctcggagccccactttgagagaccctcccagcccccacccccataattccccgcgcccgcacaattcggcctcccctcccaccccccaccccaaccaccaccgcccccagcacgggccagctccccccacagccgctccgtctcgccgtaaacactccagtgtccccagacgcccccccctttccgatcccataacaccccacgctctcctgacgccccacagccccggccgggccctcagtcaagccgcgacccaggcccccaacgacccacgcctgtctgacgccaccagtctggggcacccgacccccgcacgcctcgggcgcccctggccctgcacgcctccatcgggacccccccactggatcccctttgcccccagtgacccccatccctggccacccccgcccggccgcgccccctcgggcacccccgacccccgtgcccccccggctcgccacccccgcggcccctcgccccgcccatcggccgcagcccccggcgcgctagcccccggaccagcctaggccagggcagcggcccggccggcacggcgcccccagcaccccaggacacttgcctctggctccgggacccccacttggggtcctgcgcccccctccccgcccccagccgcggccgccgcgcctcgggaaccaggttcggccgcttggccccgcccctgccgtgcccattggccgccgctgccgcgactgccgcacccgttggctcatgcagacgtccgtcccgggcgttggcacctcccccttcctgcttggccccgcggggcgttcttaaagggaccgaagcctcccggctgctggggctggggcgggggctggggcgggggctggggcgggggctggggcgggggcgggggaccctgggctggaccccaacacgggtcagtatcgcgcagcctgtgcgactcctgcctctcctctgagcttcatcctgaccatctgcgaaatggggataaacacccccatctatgcactctcaccttgggggctgctgggggcacagtccactctaaatgttatttccttaaagagttcaagcttgacgggcagggcagctctggggttgctgaatgacccatcctgaagccttagttacagaagtgaacctgagggcctgaggaggagtgacgtgcccaaaggcatacagaaacctccctcccatcccccacacagtttaatgtctagaaggttgcctggtgcatactggaggcgctcgattactgctgcgcaggcgactgagccagcagggccactgggaggagttcctcctctatgcactgtctgctggagggtgataaggtccccatggctcgggaagaaggtggcatccttgattagctaagtttttgtggatcttgttttgaaaccgggacacttctccctccttcactcagttttatttccttcctagcagttactccttccagaattatcttgtcattattttgcttgtggttggagggaccatccctcactctgcttcatcctggcagagatttttacctgatttgtacccagcacctccttgaaccatgcctggcatctatagaagctcaataaatgggtaggtggatggatggatggatggatggatggatggatggatggatgagtcagacaccagcttttggaggtagctatcatggaggtggtaactggctttttggagatcacttctaaggttggagttcccaggttacctcctacaggaagccctcccaacctccccaaggcaagaccaggtgccccctttagctgtcttggcacaatgaagttgatgaacgtccacttcataactagtttacttgggttttttgtttgtttgtttgtttttgttttttgagaagaagtttcactcttgttgcccaagctggagtgcaatggcgcaatctcagctcaccgcaaccgctgcctcccaggttcaagcgattctcctgcctcagccttccaagtagctgggagtagaggcatgcaccaccatgcctggctaactttgtatttttagtagacacgggatttcttcatgttggtcaggctggtctcaaactcccgacctcacgtgatccgcccacctcgatgtaccaaagattacaggcatgagccatcgtgcctggccttttttttttttttctttctcttttttttttgagacagagtctctctctgtcgccaggctggagtgcagtggcgcgatctcggctcactgcaacatccacctcctaagttccaacgattctcctgcttcagcctcctgagtagctgggactacaggcacccgccaccatgcccagctaatttgtatatttttagtagagacagggtttcaccatgttggccaggatggtctggaactcctgacctcatgatctgcctgcctcggcttcccaaactagtttacttatatctctgcctttttttttttgagatagggtcttactttgaaacccaggctggagtgcagtggcacgatctcagatcactgcaaccatgtctatctcctgggctcacgcaatcctcctgcctcagcctcctgagtagctgggcccacaggtgcaccatcatgtccagctaatttttttttttttttttgagacagagtctcgctgtgtagcccaggctagagtgcagtggcgcaatctcggctcactgcaagctccgcctcccaggttcacaccattctcctgcctcagcctcccaagtagctgggactacaggcgcctgccaccatgcccgactaattttttgtatttttagtagagtcagcgtttcatcgtgttagccaggatagtctcgatctcctgaccttgtgatctgcccacctcggcctcccaaagtgctgaaattacaggcgtgagccatcgcgcccggcccaatgtttatattttttgtagagatggggtttccccatgttgcccaggctggtctcgaactcctgggctcaagcaatcctcccactttggcctcccaaactgttgggattataggcgtgagccactgctttgatttacctctgccttgccctctacactggcagagccccaaagtctgggaaggctttgttctttctcattgttatagctctgaggcttgcacagtgcctgccacaaaaggtagtggtggggtctcacggaaatcactgaggaaggaagggaggttaaaggtggtagcatagcagagctatgtaagaaatcacctggagggctgggtgcggtggcttatgccagtaatcccagcactttgggaggccgaggtgggtggatcacctgaggtcaggaaatctagaccagcctggccaacatggtgaaaccccgtctctactaaaaatacaaaaattagccgggtatggtggtgcatgcctgtaatctcagatactggggtggctgaggcatgaggactgcttgaaccccaggggtggaagttgcagtgagcaagacccagtctcaaaaacagcctttgggaggctgaggcagatggttcacctgaagtcaagagttcgagaccagcctggccaacatggtgaaacctgtctctgcgaaaaatacagaaattagccgggtgcggtggcacatgcctgtaatcccagctacttgggaggttgaggcaggagaatcgcttgaacccgggaggcagatgttgcagcgagccaagatcacgtcaccgtactccagcctgggcaacctaagcctgggtaacgtagtgagagcctgcctctacagaatattaattaattaatttggagacacagtctccctctgtctcccacgtagagtgcagtggaacgatctgggctcactgcaacctctgactcccaggttcaagcgattctcctgcctcagcctcctaagtagctgggattacaggcgcctgccatgacacatgactaattttttttttgagacagagtctagtgaggctggagtgcaatggtgtgatctcggctcactgcaacctctgcctcccaggttgaagcaattctcctgcctcagccttcctagtagctgggattacaggcgcctgccaccatgcctgcctaattttttgtatttttagtagagatgggggggttccgctatgttggccaggctggtcttgaacttctgaccttgtgatccacctgccttggcctcccaaagtgctgggattacaggcatgagccgtcacacctggcctctacagaaaatttaaaaatgtagtcccagctaaatgggaggctgaggtgggagggatcccttgaacccaggaggtcgaggctacagtgagttatgatcaaagttctgcactgcagcctgagcaacaaggcaagacgctgtttctaaaataatagtaataattattattataaattaataagctactaaaataaactataaaataacaccaccaacaataataataatggctggcactcattgaacagatatttgcaggcaaacattttacttatatttgcttttcccttttttttttttttgggacagaatctcgctctgtcgcccaggccggagtgcagtggcacgatctcggctcactgccacctctgcctcccaagttcaagcaattctcctgtctcagcctctggagtagctgggactacaggcaccagccaccaagcctggctaatttttgcatttctcgtggagacggggtttcactgtattggtcaggctggtctcaaactcttgacctcgatctcaaaaacaaaacaaaacaaaacaaaaacaaaaaaacaagactgctctacttggaggccatatcattggctgcatgtagagttgcaattgtgtttcctggtgaactgaacctttttttttttgagatggagtctcaatctgtcgcctaggctggagtgcagtggcaagatctcagatcactgcagcctctgccccttgggttcaagtgattctcctgcctcaccctcccgagtagctgggattacaggcacccgccaccacgcttggctaatttttgtatttttagttgagacggggtttcgccatgttggccagggtgttctcaaactcctgatctcatgtgatccacctgcctcggcctctcaaagtgctgggattgcaggcatgagccagagcgccaggcccgatctgaacctttcattgttaagatgtgcccctctttacttctttcatttttcccttagagtgcactttgttaagattgcacaccaagcttgggcatggtggctcactcctgtaatcccagcactttgggaggccgaggcgggctgatcacgaggtgaagagatcgagaccatcctggccaacatggtgaaaccccgtctgtactaaaaacagaaaaattagctgggcatggtggcacactccagtaatcccagctactcaggaggctgaggcaggagaattgcttgaactcgggaggcggaggttgcagtgagccaagattgcgccacttcactctagcctggagacagagctagactccatctcaaaaacaaaaaagaaaaaaaaattacacaccaattctccttggttcatgttttctttctttctttctgacacaaggtctcactgtgtggcccaggctggagtgcagtggcacaatcatgagtcactgcagcctcaatcacccacgctcaagcaatcctcccagctcagcctctccagtagcttcaactacaggtgtgcaccaccatgcccagctactttttttatatttattgtttgtagagatggagtcttgctacattgctcaggctgttctcaaactcctgggctcaagcaatcctctcacctcggccttgcaaagtgctgggattataggcatgagccattgcgcccgggtccatctttgttttttaactggggaatttggtctattggtatttaatgtaattatggacatatctagacataaatctgtctcattaggtggttttcctcttttttttttttttttgagatggagtcgctctgttgctaggctggagcagtgatcacgccattgcacttcagtacaggcaacagagtaagaccctatcacacacacaaaaaaggaaatgaaatggaaaaaagtggcagagaaagccttccagtccccaaacccgacccccgaaagtccccatctctgggcagactgaatgttcgcataactttctatcctctcccttcatcatacaaaaaaacatgttcttatctcaagtccagtgtatacaaaacatcaggggccagccaagtcccttttggcctcaatctatagtccccaccccttctaagaccctcgtaaatgttccttggcttccaaaagagccccaaggacccactgaaaagtttgattttggcttggcactgtggctcatatctgtaatcccagcaatttgggaagccaaggcgggtggatcacttgaggtcaggagttcgagaccagcctggccaatatggcgaaaccctgtctttaccaatacaaaaattatctggacatagtggtgcatgcctgtaatcccagctactcaagagggtagggcaggaaaatcacctgaatctgggaggccgaggttgcagtgagccaagattgcaatactacactccagtctcagtgacagagcaagacctggtctcaaaaaaaaaaacaaaaaacaaaaaaaaacaaacaaacccgggcgcagtgctcatgcctgtaatcccagcactttgggaggctgaggcgggaggatcacaaggtcaggagattgagaccatcctggccaacatggtgaaacccctctctagtaaaaatacaaaaattagccgggtatagtggcatgtgcctgtaatcccagctcctcaggaggctgaggcaggagagtcacctgaacctgggagacggaggttgtagtgagctgagattgtgccactgcactcctgcctggatgacagagtgagactctgtctcaaaaaacaaacaaacaaactgttgaactaaatatacaagaattctagtcaggcgcggtggctcacgcctgtaatcccagcactttgggaggccgaggcaggtgaatcacaagatcaggagttcgagaccagcctgaccaacatggtgaaacctggtctctactaaaaatacaaaaattagatgggcgtggtggcacacacctgtaatcccagctacttgggaggctgagccaggagaatcgcttgaacccgggaggcagaggttgcagtgagccgagatcgcaccactgcactccagcctgggcgacagagtgagattccatctcaaaaaaaaaaaaaaaaaaaaaagaattctagccaggtacagtagctcacacctgtaatcccagcactttgggaggccaaagcgggcggatcacctgaggtcaggagtttgagaccagcctggccaacatggtaaaaccctgtttctagtaaaaatacaaaaattatccaggtgtggtggtgggtgcctataatcccagcttctggggacgctgagacaggagaatcacttgaacccagaaggtggaggttgcagtgtgctgagatcgcaccactgcactccagcctgggtgacaaagtgagactctgtctcaaattaaaaagcaacagcctggccgggcgcggtggctcacgcctgtaatcccagcactttgggaggccgaggcgggcggatcacgaggtcaggagatcgagaccatcccggctaaaaaacggtgaaaccccgtctctactaaaaatacaaaaaattagccgggcgtagtggcgggcgcctgtagtcccagctacttgggaggctgaggcaggagaatggcgtgaacccgggaggcggagcttgcagtgagccgagatcgcgccactgcactccagcctgggcgacagagcgagactccgtctcaaaaaaaaaaaaaaaaaaaaaaaaaaagcaacagcctgggcgtggtagctcacacctgtaatcccagcactttgggaagccaaggaggggtggatcacgaggtcaggagttggagaccaagctggccaacatggtgagaccctgtctctactaaaaatacaaaaattagctgggtatggtggtgcacacctgtaatcccagctactcgggaggctgaggcaggagaatggcttgaatacgggaggcagaggttgcagtgagctgagatcacgccactgtactccagcctgggcaacagagtgaggctcagtctcaaaaaaaaaaaaaaaaaaaaaaccgccaccaacaacaaaaaccaattgttgaactaaatatataagaattcctgccgggtgtgatggctcatgcctgtaatcccagcactttgggaggccgaggcgggctgatcacaaggttaggagatcgagaccatcctgtgaatggtgaaaccccgtctctactaaaaatacaaaaaaaaaaaaaattagctgggtgtggtggcaggcacctgtggtccttgctactccggaggctgaggcgggagaatgctgtgaacccaggaggcagagcttgcagtgagctgaaattgcgccactgcactccagcctgagcgacagagcgagactctgtctcaaaaaaaaaaaaaggattccagtcctcattgacttcttttttttttttttctgagacagggtctccctctgttaccgagcctggagtacagtggtgaaatcctagcttactgcagcctggaacttctgggatcaagtaattcttccacttcagcctcccaagcacctgggactacagatgtgcaccaccacgcccagttaatttttaaaattttttttagaaacaaggtctcaatgtttcccaggctggcctcaaactcttgggctgaatggatcctccagcctctgcctcccagtcactgactttcccatgaatgacggcagcagaacctgggagcgatattatcaacagtttactgagggcttactgtgtaccaagtcttgttgtaaggattttgcctacgtgatttcatagagttaagccgcttgcccagggccattcagctaggatttaaaactcagatatgtgtaattccagggctctgaaacagtcttcatgtgcccaagaacttgtgtgtttatcttccaagctctcaacaaccttcagagatagatgttgtgattacacagactcgcaattaacagagactcagagaagttacaaatataatttataacatacacaccgtatagaatctcaatagctaacagtaattacttgtaaacattaattttatttttttaaacctaatgacacacttctgaaaagcaaacatgtatggagcaattactattcaccttgttttgttcatacatttaacttggattatctcactttaaaaaaggcatcctagtggccgggagtggtggctcacgcctgtaatcccgcactttgggaggctgaggccggcagatcacctgaggttgggagttcgagaccagcctagccaacaaggagaaaccccatctctactaaaaatacaaaattagtagggtgtggtggcacatgcctataatcccagctactcgggaggctgaggcaggagaatcccttgaactcagggggcagagattacggtgagctaagataacgccatcatactccagcctgggcaacaagagcgaaactctgtctcaaaaaaaaaaaaagaaaaaaaaaaaggcatcctaggtagggcgcggtggctcatgcttgtaatcccagcactttgggaggtcgaggtaggcggatcacctgaggtcgggagtttgagaccagcctgaccaaatggagaaaccccatctctactaaaaatacaaaattagccggatgtggtggcgcatgcctgtaatcccagctactcgagaggctgagggaggagaatcgcttgaacctgggaggcagaggttccaatgagccgtgatcctgccattgcactccagcatgggcaacaagagtgaaactccacctcaaaaaaaaaaaaaaaaaaagcatccttggccgggcgcggtggctcactcctgtaatcctagcactttgggaggccgaggcaggcagatcatgatgtcaggactttgagactagcctgggcaacatagtgaaaccccgtctctactaaaaatacaaaaaattagccgggcatggtggtgggcgcctataatcccagctactcaggaggctgaggcaggagaattgcttgaacctgggaggcagggttgcagtgagccgagatggcgccattgcactccagcccaggcaacaacagcgagactctgtctcaaaaaaagaaaaggcatcctcatctccgtatgaattcatggtttgtatttattttttattttttgagacagggtcttgctctgttgcctgactggagtgcagaggtgcaatcacggctcactgcagcctccacctttgggactcgggtgatctcacctcggcctcctgagtagctgggactacaggcatgcgccaccacgcccagctaatgtttttgtttttgtttttgttgttgttttgagacagagtctcactttgtcacccaggctggagtgcaatggcgcgatctcagctcactgcaaactccgcctcctgggttcaagtgattctcctgcccagccttgtgtgtagctgggattgcaggcacgtaccaccatgcctggctaatttttgtatttttagtagagacgaggtttcaccatgttggccaggctggtctcaaacccctgacctcatgatccacctgcctcggcctcccaaagtcctgggattacaggcttgagccactgcacctggccactgagccaccgcgcctggccacttgttttgttttttgagacagagtctcactctatcacccagctggagtgcaacggcacgatctcggctcaccgcaacctcagccacctgggttcaagcgattctcttgcctcagccttccaagtagttgggataacaggcatgcgccacctcgcccagctaatttttgtgtttttagtagagacagggtttcgtcatgttggccaggctggtctcaaactcctgaccccaggtgatctgcccccctcagcctcccaaaatgctaggattacaggagtgcacctggccatgtttgtattttttgtagagacagacttttgccatgttgcccaggctggtctcaaactcctgagttcaactgatctgcccgcctcggcctcccaaagtgctaggattacaggcatgaaccactgcacccagcttcatgatttgtatttatttggagaatgggtctctgtcacccaggctggagtgcagtggcttgatcacagctcactgcagcctcaaactcctgggtttaagtgatcctcccacctcatccttctgagtagctgagattacaggtttgtgccaccacgcctggcttattgtttagctgtgcctgctgacgggtacctctagaagcagtgacaccccagcagcaatgagcacacacagcacccagatcttagtttaattttttttttttgaagacagagtctcactctgtcccgcaggccggagtgcagtggcgcaatctcagctcattgcaacctctgcctccctggttcaagccattctcctgcctcagcctccctagtaactgggattacaggcacacgctgccacacccggctaactttttgtgttttagtagagacagggtttcactgtgttgcccaggctggtcacgaactcctgagctcaggcaatctgcctgccttggcttcccaaagtgttaggattacaggcatgagccaccgtgcccggccttttttttttttttttttttttgagatggagtcttgctctgttgcccaggctggagtgcagtggcgtgttcttggctcactgcaacctctgtctcctgggttcaagcaattctcctgcctcaggctcccgagtagctaggactacaggtgtgcaccacaatgcccagctaattgtgtgtgtgtggtgtgtgtgtgtgtgtgtgtgtgtgttttagtagggacggggtttcaccatgctggccaggctggtctcaaactccttacctcaggtaatctgcccgcctcggcctcccagaatgccgggattacaggcatgagccacagcacccggctaatttctttctttctttcccttctttccctccctccctcccttcctttctttccttctttcttttttttttttttttttgagatggagtttcgctcttgttgcccaggctggagtgcagtggtgtgatctcggatcactgcaacctctgtctcccaggttcaaacgattctcctgcctcagcctcccaagtagctaggattacagggatgtgccaccatgcctggctaattttgtatttttagtaaagacagggttactccatgttggtcaggctggtctcgaactcccgacctcaggtgatctgcccacctcagcctcccaaagtgctgggattacaggagtgagccactacacccggcctctttcttttttgttttgagacagagtttcgctcttgttgcccaggctggagtgcagtgggtgatctcagctcactgcaacctctgcctcccagttccaagtgattctccagtgtctcgagtaactgggattacaggtgcccaccaccatgcctggctaatttttttgtgtttttaatagagatgggggggtttcatcatgttggcccaggtggtctcgaactcctgacttcctgatctgcccacctcagcttcccacagtgctgggattacaggcgtgaatcactgagccccgactgatcttggtttctaaatcctactcttgaagcaaaggaaccaggttccttggagaaatggctgattccagggattttacacagcattggatcatgttgtggagcccaagataaataatgctcagagaatggtggcgacatattaaaaggacacaggagcttatttattatttatttatttatttattgagacggagtcttgctctgtcgcccaggctggagtgcagtggctcgatctctgctcactgcaagcttcgcctcccgggtttgcaccattctcctgcctcagcctcccgagtagctaggaccacaggcacctgccaccacgcctggctaattttttgtatttttagtagagatagggtttcaccatgttagccaggatggtctcaatctcctgacctcatgatccgcccgcctcggcctcccaaagtgctgggattacaggcgtgagccactgcacccagccaggagctaatttaaaggggcaggaaaggaaataattataattataatgatgtggatttattaatccacatcagtttatagcgatttttgttgttgttgttgttgttgctttttgagacaaagtctcattctgtcacccaggctggagtgcagtggcacaatctcggctcactgcaatctccgcctcccaggttcaagagattctcatgcctcatcctcctgagtagctatgattatagcacctgccaccacgccaggctaattttttttttttttttttggatttttagtagagacggggtttcaccatgttggccagtctggtctcaaactcccgacctcaggtgatccacacgcctggcatcccaaagtgctggggttacaggcgtgagccactgcgccgggcctgtttgttttttgagactgggtctcactctgttgcccaggctggagtggggtcttcgttcactgcaacttctgcctcctggcctcaaacgatactcctacctcagcctcttgagaaactgggaccacaggctcgggccacaggcccgtttttttttttttttccaattgtagctgtgaggcattttattacaaaaacttggtactcgtatacacaaactaacatgaacttaaaatacattttcttcattttttagcttgaccttcttttttttttttgagacgtggtcttgctctatcgcccaagctggagtgcagtggtgcgatcttggcttactgcagcctctgcctcctgggttcaagcgattctcctgcctcagcctcctgagtagctgggattacaggctcccgccaccactcccgactaattttttttatttttagtagagacaaggtttcaccatgttggtcaggctggtctcgaactcctgatctcgtgatccgcccgcctcggcctcccaaagtgctcggattacaatgacaggatgtgagccaccgcgcccagcctgtaaacccttttgaaaaaattccccagcgcattactccaaaacaacgtggaagtgtaaatggaaaccagggctgggcgcggtggctcatgcctgtaatcccagcactttgggaggccgaggcgggcagatcacctgaggtcgggagatcgggacccgcctgaccaacatggagaaaccctgtctctactaaaaacacaaaacttgccgggcatggtggcacatgcctgtaattccagctactccggaaggctgaggcagatgaatcgcttgaacctgggaagcggaggttgcggtgagccgagatcacgccattgtactccagcctgggcaacaagagcgaaactctgtctcaaaaaaaaaaaaaaaaaaaaaaaaaggaaacttggaccaaaaaaatcagcaaaagtggagcagggatgtctgaacacagatgagtctaattccctgcttggaaagcaggacacctgagtgtggtttggcctctgaccactgtagcatttacgaccttggggagggttaccactctgggacctcagtcacactatctacaaaatgggacacttctctcagccttccttcttccgggccgctttcaagcctgggcttctggaaatacgcaggcgcgagatgaattgtttgattggctattcattgtgatgcacccacgagctgaagctccgtctaagccccgccctttcctgtcgtgacttaacgcacgcaagcggctccagggtacgtccccgccacgcgcgctcgcaggatcggtgcgtggtgacgtttcgccggcgcgggcgccatcccggaagcgcgagcaaggccgccagatgtgcaggtgccgccgctaccgacgccggggccgagtttggggtggggctggggactccagggccgcggggaaccggtccgggtcgggcgcggcccccgggctgcggtggggtggggtgcgccactggccacatctggtcattcctgctgcgcacaggcctcagtttccccgtctgctcaatggatacgcaggcggcgctacgggctggatctggatccggatcaggggcataggaattggggcctcctgtgttctgggtgtgtcgtgtaacctggagctgggcgttgcccggtttgtgcctcagtttccctgtattgtaggggacggggcgtgaggggatatttgagcccctccccacttggggtttttcagagcttggatggctgagttaaattctgttaaataacctggatatagaaccgtggtgcttctctgcctctccctgtgagtttcggcaacggagcccgcccctgtgagcctcagtttcactcggagatgattgtgtctgcctcgtaacggtgattgaggatgaaatgaagtgctctacaagtgtttgcccgtaatatattcttagaggcccctgggatgctctcaaaatgttgattcccgggacttcttcacactcctcttggagaaacagcctgtcctgagctccagtcgttatcacctttggtttcagttgccacagacagcactgtgagatcttcattctaccttattttcattttatggttgaaaaaactgattcagaagggtgaagtggctctcccatggtcaaacagcctacctctctgcgtttcttcaataaatctacatttggagttgggatcagagctcttgctgggtcaatttcactgtgtatgtgggccagactagcagtaatcagggaaggcttcttgggagaggaagttgcggggggacgggagggaggtgccaggaacccctcagccctcacatctgggagccagagacagaaaagagtcctgttttgaaggaggagtgtatcccagaaggtcccagtactgtgtctcactggtactagctatgggcctccctctccaggtgtctttttttttttttttttttttttttcagttgagatgaagtctccctctgtagcccacactagaatgcagtggcttgattttggctcattgcaacctctgcctcccgggttcaagcgattctcctgcctcagcctcctgagtagctgggactacaggtgcccgccatcatgcctggctaatttttgtatttttagtagagacgggggtttcaccatgttcaccaggctagtcttgaactcatgacctcaggtgatccaccagccttggcttcccaaagtgctgagattacaggcatgagcacccggtccaggtatcctctttatacaagatcatgcttctttgggaatgtggagactgggtgtctctgcatggcatgtcataggagttcaataaccatagttattattagagggaagggggttttgctgggtgtggcaccttatttctagaaggtgctgcaaaccactgaccagatacagatcacaaatagatgctcttggcctccatgatatcttggaaaaaagtattgattgctgacatttgtcaatgaggcaatttcccagaaaaaaaaaatccctgtttcctttttcctggagaaacatcagaagtcaggcagaaatcagctgctgtaagaagccactgtcctgtcacagctggatattgtgcacctgttcagattcacacctttgtgagacccgtgggctgtggccgtttgttgtgacttaggttcactggctgtgtgacagtggcccagtttctcagtgtccctgagcctcagttttctcatctataaataagaatgataacagtatgtatgagcttgatgctttgtttagcatagagtagctgctgaataaatgggagagtacattaagtgagctctgaaaccctttctttctctttcctttctttctctctttctctgtctctctctctttctctcctctctctttctctctttgtctctctctctttctctccttctctctctctttctctctctcccttccttccttccctccctccctcccttccttccttcttttcgagatggagtctcactctgtcgcccgggctggagtgtagtggcatgatctcggctcattgcaacctctgcctcccaggttcaagccattctcctgcctcagccatccaagtagctgcgactacaggtgcccgccaccatgcccggctaattttttttgtatttttagtagagactgagtttcactatgttggccaggctggttttgaactcctgacctcaagcagtctgcccacctcggcctcccaaagtgctaggattacagacgtgagccaccacacccggcctctgaaaccctttctgatccagtagaagttcgtctctgtttcttggctattaaatgtgtgggcctcagagccaaactatatcaagatcctagatttttcctgaactccctaggagggtcagtgctgtagcccctcctaccctggctgctccgggaagtccctgcctgccattacggtcatctgtgtgccagcaaaactgggaacctcagaaccatctggattgctggggcccacaggttggctgtgagtacctgcaattcttggctttaatttgctaataaaagtgtcacgtcagagctgagtttgaaaagttctgttgcccttccccacaacaacattctggcagccccttgctatgagccagactccgggtcgggttctggtgacagacacacctctactccttcttttttttttttgagacggagtctctctgttgcccaggctggagtgcagtggcacagtcttggctcaccacaacctccgcctcctgggttcaagtgattctcctgcctcaagctcccgagtagctgggactaaaggtgcccaccaccatgcctggctaatttttgtatttttagtagagatggggtttcactatgttggccaggctggtctcgaactcctgacctcgtgatccacctgcctcgccctcccagagtgctaggattacaggcgtgagccacagcacctggccacctctgctcttttggagctgacgttgtggcggtgacaggcaaacgggttagctgataactaggataatttcatgaagaggtgaaccagtgaagcagttaaatcaaggtaaagggtggctgggcgcagtggctcaggcctgtaatcctagcactttgggaggccaaggcaaaagggtcgtgtcagcctaggaatttaagagcagcctaggcaacatagcgagaccctgtctcttaacaaacaaacaaacaaaaacaaggtaaagtagcctgggcgcggtggctcatgcctgtaatcccagcactttgggaggctgaggcgagtggatcacctgaggtcagtagttcgagaccagcctggccaaaatggtgaaaccccgtctctactaaaaaatacaaaaattagccaggcgtggtggcgggcacctgtaatcccagctacttgggagggtgaggcaggagaatcgcttgaacctgggaggcggaggttgcgctaagccaagatcgcgccattgcactccagcctgggtgacaggagtgaaactctgtatcaaaaagaaataaaaaaacgaggtcaagtagtaagagaagcggtaagagtgacgggaacaggagtcattgacctcttgggagaggagacattggaggtggtgatgatttgctgaagcagccacacacgttcagcttgtgaggacagcagttgttaggcaggggatgagggaggaagctggcagatctgtgcaggtgagaggtacctgtggccttgggctcatggaagtgggaggtgatgggattctaatgtgcttgggtacagtttacaaatacaacctctcttagtttgcccaatacctccaaattcctggggtggcacacctgaggttcaggtggcatgactgagccacagtcacacatccccactgtaggataccaccacggttgggttaggttccagcacatggcggtcccggcctggcctcttggtcccacctcacctggtgactagtgcagaccactctgttcttgcctgtttcaggcagcggaggaggagaaagagatggacctcccggactcggcctcgagggtcttctgcggccgcatcctgagcatggtgaacacagatgatgtcaacgccatcatcctggcccagaagaacatgtgagtggcggctgggggacctgagcgtgggaaggaatccacaggctggccaacattcttgtcttgcccgcccctacccggggcccacactggtgataaaatgaaggaaatgagcaaatctgtcgctggctccaaagtaaattccttcccggcctggaggcgaggccttggcacaggaagcagggctttggggagattttgcagctgcggatggcttggcgggggccgcaggggctcctgtcccgagacctggggtgggagagttgaaggaccagagggggccacatgcaggtttttttgtttatttgtttcttgtttttgagacagagttttgctcttgttgcccaggctagagtgcaatggtgtgaccttgcctcactgcaacctccgcctcccgagttcaagcgatttctcctgcctcagccctctgagtagctgggattacaagcatgtgccaccatgcccagctaatttttgtatttttagtagagacgggctttcatcatgttggtcaggctggtctcgaactcctgacctcaagtgatccacccgcctcggcctcccgaagtcctgggattataggcctgagccactgtgcctggcctttatgcaggttttatgctggtgcgcctacttcctggtgaaggactagtctcccagagcccaggctgtgtctgcacagtgcccagggtctcttggagcggacataaaggcctcttgtcctcactggggtttggtgctgtggctgctgaaaccttgccctaattcaggcctgccctgtggggaagaaaggctaataccaagcttgtccaaccctcggcctgtccaaccctttgaatgtgggccaacacaaattcgtaaactttcttaaaacattacgagattttttttgtgatttttttctttttctttcttaactcatcagctgtcgttagtgttagtgtattttatgtgtggcccaagacaattcttcttccaatgtggcccagggaaatgaaaagactggacaccactgggctaatacagtcttggagtggaagcacagcctcccgcagctttgtttttgtgtctctgagccagaggctcttctcagctgtcacgacacagtacagacctgatttccttaccttttctcccagacccagagcagctccgagtctcaatagtacctgtctctctcctgtgtcttttttttttttttttttgggagacagagtctcactctgtcgcccaggctggaatgcaatagcataattgctgctcactacatcctctgcctcctgggtcaagtgattctcctgcttcagcctcctgagtcgctgggattataggcatgcaccaccatgcctggctgattttttttttgtgacggagtctcgctctctcgccaggctggagcacagtggcgcaatctcagctcactgcaacctctgcctgctgggttcaagcgattctactgcctcagccttccaagtagctgggactacaggtgtgcgccaccacggccagctaatttttgtatttttagtagagacggggtttcaccacgttgaccagaatggtctcaatctcttgacttcgtgatccgcccgcctcagcctcccaaagtgctgggattacaggtgtgagccaccgtgcccggccctgatttttttatttttagaagagatgtggtttcaccatgttggccagacctcaagtgatccaccctgcctcaacctcctaaagtgctggtctccttttttttgagacatagtttcgcactgtcacccaggctggagtgcagtggcgcaatctcaggtcactgctatgtccgcctcccgggttcaaatgattctcctgcctcagcctcccgagtagctgggattacaggcgcccgccaccatgcccagccaatttttgtatttttggtagagacgcggttttcccatgttggcaaggctggtctcgaactcctgacctcatgatctgcctgccttgacctcccaaagcgctggaattgcaggcatgagcccccatgcccggctggtctcctgtttttttaggtcagattcagacctggctctgggaaacttctagactgaggggagacaaagccagacacagaccctcctggccctatggtgtcagggctgggccagaggaacaacctggggctagtggaattaaaagagtctgattgggccaggcacgatggctcactcctgtaatcccagcactttgggaggccgaggtgggtggatcacgaggtcaggagatcgagaccatcctggctaacctggtgaaacctcgtctctactaaaaatacaaaaaattagccaggcatggtggcggacgcctgtagtcccagctatactcgggaggctgaggcaggagaatggtatgaacctgggagacggagcttgcagtgagccgagatcgcgccactgcactccagcctgggtgacgaagcaagactctgtctcaaaaaaagtctgactgaatagaggtagacaaggctacatgagaaggacacacttgagtagggttttgaaggttgaataggagtttgctaggtggctcaaagagtaggtagaactctgcaggacaagggaacagcccatgcaaaggttgtgaagcaggcaagggcttggcatgaacagtcttctgggccaggttgggcagggccctgaagctgggcagtgaagctcatgccctctctccaccatcaggctggaccgctttgagaagaccaatgagatgctgctcaacttcaacaacctgtccagtgcccgcctgcagcagatgagcgaacgcttcctgcaccacacgaggaccctagtagagatgaaacgggacctggacagcatcttccgccgtatcaggtgggtgctcagtgccaccccagcccagctgacctctgcctccacctccccatctgagcctcagtttccttcacataccagggtaaagggagatttctgtttgttttacaaggcttcactgcgcacttaagtgtctgggacaattccaaccctgggataaaatcttgacgtaagtttatttactgattgattaattgatcgagacagagttttttttttttttttggagacggagtctcgctctgttgcccaggctggagtgcagtggcgcgacctcagctcactgcaagctccgcttcccgggctcacgccattctcctgcctcagtctccggagtagctgggattacaggtgcctaccaccacgcctggagaattttttgtatttttagtggagatggggtttcaccgtgttagtagtcaggatggtctcgatctcctgacctcgtgatccagccgccttggcctcccaaagtgctgggattacaggcgtgagccactgcgcccggccgagacagagtcttgatctgtggccctggctggagtgcagtggcgtgatcttggctcactgcaacctctgcctcctggattcaagcgattcttgtgcttcagccttctgagtagctgggtctacagacatactgtaccacacccagctaatttttgttgttgttgttttatttttgaggtggagtcttgctctgtcgcccaggctggagtgcagtggtgcaatgtcagctcactgcaacctccgcctcccaggttcaagcgattctcctgcttcagcctcctgagtagctgggactacaggcgcatgctgccacgcccagctgattttttgtattttagtagagacgagatttcaccgtgttgcccaggctagtctcaaactcctgagctccagcactctgcctgcctcggcctcctaaagtgttgggattacaggtgtgagcctaatttttgtattttgtgtaatttttgtatttttttagtagagacagggtttccccatgttggccaggctcatctcgaagtcctggcctcagatgatccatccacctcgacctcccaaagtgctgggattataggcatgagccatcatgcccagccttgcagtttatttattcttaaaaaatgtaacacagtgcggctgggcgaggtggcccatgcctgtaatcccagcactttgggaggccgaggcaggcggatcacgaggtcaggagatcaagaccatcccggctaacatggtgaaaccccgtctctactaaaaatacaaaaaatactaaaaatacaaaaaattagctgggcgtggtggtgggcgtctgtattgccagctactcgggaggctgaggcaggagaatggcatgaacccaggaggtgagccgagatcgcgccactgcactcaagcctgggcgacagagcgagactccgtctcaaaaaaaaaaaaaaagtaacatagtgctagacacataatgaaaaggcaggaatggctgggcacagtggctcatgcctgtaatcccagcagttagggaggctgacgcaggcagatcacctgaggtcagaagtttgagaccagcctggccaacatgatgaaatcccgtctctactaaaaatacaaaaaaatcagctgagcatggtggcacgtgcctgtaatcccagctacttgggaggctgagggaggacaatcatgtgaatccggaaggtggaggttgcagtgagccaggatggcaccactgcactccaccctgggcgacagagtgagattctgtctcaaaaaaaaaaaaaaaatttatcagagaagaggccacatgtaagaagcagcctcgcagggggagcccccagccagtgcctaggctcagagcacccagagtctaactagttgggggttggtgcctaccttggggctggaggccggctggtgggcgactgtcagggccgtggctgctgggccgagcacctagagagagtgaagatgtgaggtgatgaacagtgtgggggttctcactcccgtctccccttgccctcagctggcagcaggggcttgtggccagcaccaggcccagcctacctgctcagcaggttaagccctgtgtgccttctctcccctgcaggacgctgaaagggaaactggccaggcagcacccagaggccttcagccgtaagtgtcacgcagggttcctgctcccgagcacgtcagcactctccacccagggcaggcttctggaaggccaccttggggcctgatactgagaccaggctgtaatgggcagtgggtctggggaaacctggggtgggggcagggtcagggtgctggcctggtcctgtcagcagctggcagagtgggcactaggacgggagtccgtgccccgtggggaggccgcacaggagaatgtggataagcagcatgacaatccttatccctgtgtgcattatgagccatctcagaacagagcacgggctcatgtgacaccagccccgacatcgtctcgccttccctgagccccagcttcgaggatctgtcccatgtccagctgttacccacagtcacccatggggtggggactgtgagtatcaccgtttcatggagagggaaacagaggcccagaggggcaggacttgagttcgcatctgtctggctagagagctcgcgtgttctctggggtaccattccatgttgccaccaccttaaagggctctgcaggctgagcctgggttcacaccatctgttgaaaaggccgacagctctccatcccagggcctccaacagcagtttacagagcagggagctgggctgaggggaggtcatatacctagcccaggtagtgcagtgagccaggttcgccctcagggctcctgtaggcctaaccccagatcttgtgtcccttcctcacctcaccttgaagggagggctcttccctgcctgggcctcagttttctcctctacaaaataaaaatgggccaagtctgccaggcgcggtggctcatgcctgtaatcccaacactttgggaggctgaggcgggtggatcacctgaggtcgggagttcgataccagcctgaccaacatagagaaaccccgtctctagtaaaaatacaaaattagatgggcgtgatgatgggcatctgtagtctcagctactcaggaggttaaggcagaagaatcgcttgaacccgggagacggaggttgcagtgagccgagattataccattgcactctagcctgggcaaagagcgaaactccgtctcaaaaaaaaaaaaaaaaaagggtcaagtcatacccccatggggtgagggcagccgttaggggtcacatggacaataagtcctacatcacagagcttggcaaggtgacaaaaccaactcttgggcctccttcccccagatatcccagaggcatccttcctggaggaagaggatgaagaccccatcccacccagcaccacgaccaccattgccacctcagaacagagcacgggctcatgtgacaccagccccgacaccgtctcgccctccctgagccccggcttcgaggacctgtcccatgtccagcctggctccccagccatcaacggccgcagccagacagatgacgaggagatgacgggcgaatagccctgctgcccggtgccttgagggggtctcagggcagcagcatacaaggtggcagcgggtaaccctgccttgttctgtcatccagggctcctttgctgccccgttctgtcacccagggctcctagggggacaaggctctctcccgaggggtgtggaattcctgggggggtctttaattctggctccttccttcctcagaacatctctattctgcaagacccctctgccatgccagggcacgcccattccagctggagtcgtggggctgggcacaggggaatttttccagagctgagcctgacgtctgctctgaagaatgcttagaaggttcccagacaccagagccagatgtcccccaccaccggtcaggacctccttgaggtgcacaagcacggtctcctctgagttcaccccagcccacccccgcacccactaattctgcttttcctgccccttgctccgtaaaagtatcaaatactttctccttggtatctcaaggaggtttctgagataggtagaagtcttgagacggaggctggccatccattcagccctgagcgtgctgagttctgtgtttctctgaatagaggtgtggaacctgaggggccagcaggcctctctgaaggcctccatggagcaaacggagccacctcgggaaagagtttaatggaatatttttgtacccgatgtttacagatgctgttgggaagttatcaataaaaagacaccattactaaaaagggaaaagtacacctagctgtggcttcttcagtccttaagccaagcaacccaaaaggagggcaagtgctggatgtggggctgggggccctgctggagggaggtgcagacaatcaggcactacagggctagaaagagatgtggcccttttttggaaccccccctggtgggagctataacaacccaagttcccgtcaccagctaggtcttccctcacgctgctgtcactgctcacaatactagtgttcccatcctcatttcataattccttctccagatctcagccttcctccagataggggagccacactagatccattccccatcagacacactcccagggttacctcatcttctgagtacttagaaattatgttgttatgaccgggcttggtggctcatgcctgtaatcccagcactttgggaggccgaggtgggtggatcacctgaggtcaggagttcgagaccagcctggccaacatggtgaaaccccatctctaccaaaaatataaaaattagctgggtgtggtggtgtacacctgtaatcccagctacttgggaggctgaggcagaattgcttgaatccaggaggcagaggttgcagtgagccaagatcgcaccactgcactctagcctgggcaaaaagaccaaaactgttgtctcaaaaaagaaaaggaaattaggttcttaaaggcatcttcccagacgtgagagtgtctgcttttgcctggtatagtagtgcctgcaaatgttcaaggaaataaacaggtacccctgttaagcctataggtaacttctcattgctccccatcttctctgtactcagcactttttttttttgttttgtttttgagacagcacctctctgttgcccaggctggagtgcagtggctgaatcatgggtcactgcaatctcaaacctatgggttcaggcaatcctcctgcctccgaagtagctgggactgcaggtgcgcaccaccacacctggatagttcaaaataaaacttttttttgtagagacagggtctcactatgtcttccaggctggtcgtgaattcctgacctcaagtaatcctccctctttgaccttccaaagtgctgggattacaagtgtgaaccactgcacccgccgtggcactttttttttttttttttttttttgagatggagtctcactctgtcacccaggctgggtgcagtggcgtgaactcagctcactgcaacctccacctcccggattcaagcgattctcctgcctcagcctcctgagtagctgggattacaggcacccgccaccacacctgaaaaatttttgtaattttttttttcttttttgagacggagttttgctcttgttgcccaggctgtagtgcaatggcactctctcggctaattgcaacctctgcctcccgggttcaagcgattctcctgcctcagcctcctgagtagctgggattacaggcatgcgccaccacgcccagctaattttgtatttttagtagagatgcggtttctccatgttggtcaggctcgtctcgaactcccgacctcaggtgatccgcacatctcggcctcccaaagtgcaggcgtgagtcaccggacccaggtcccgccctggcactttttaaccacccacaaatctggatcctacactgaaaagagacactgcagtggctcacgtctgtaatcccagcactttgggaggccaaggcgggcggatcacctgaggtcgcgagtttgagaccagcctgaccaacatggagaaaccccgtctctactaaaaatacaaaagtggccaggcatggtgtcgcacacttgtaatcgcagctactcgggaggctgaggcaggagaattgcttgaacccaggaggcggaggttgcggtgagccgagatcgcgccattgcactacagcctgggcaacgagagcgaaactccgtctcaaaaaaaaaaaaaaaaaaaatcctgagtcccgcttgacaccttttgtcaggcaccaccacctttctgggcgaatgcggtagtaccgtctgctctccctgctgctgtcctgaaatccattcaggcacagcggccgagagctttataataaccgattccaggtgttaggtgctttcccagccccgactcctgcgtcctggacccgcagtcctctgcttaatacctttgctttattagaaaacattctcctctactccgttcagctattcgctgagggcccgccaaccgccagcggttgtcagtggcctagaggcagcggacgcaaacacggggagaggtgcaatcgtctcaagtgactcggcgggcggggcccacaaccggaagcgggtgggcgaccttcacccacgtgcgctgcggcttcgttcgccagcatccaagatggcggcagggcggggcccaaggcgcggcgcgaattgtgacgcaggcgtccggcgtgctccgtgcgcaagcgctttcggcggcgattaggtggtttccggttccgctatcttctttttcttcagcgaggcggccgagctggttggtggcggcggtcgtgcgggttcgcgccgggccgagagcgggttgggggctgcgggaggctgcaggggcctgggcggcagaagaggcggccctgagctggctcatgcgggccagtctcggcagggtggctgggcagggctcgcgaggccacggctcggagcccagaccggggcccaggaggcgagcgccgttttggagaggagcctgcctgctctgcctgccagcgtgaccccacgaggcctcgggcgggaagaggtcctcggggcagatccgagttaatgagagaggggtattgagcgtgtagcgttaactctgccagtcactgcgtcagtcgctttggaaatactaaatttctcgagctgagtcttcatacctggctccattactacgtctgtaaggaggagctggtggtagtgtctgctttttagacttttctttagactatttgtatttttttcagatggagtcttgctctgtcgcctaagctggagttcagtggtgcggtctcggctcactgcaatctccacctcccgggctcgagcgattcttctgcctcagcctcccgagtagctgggattataggcgcctgccaccacgcccagttgatttttgtagttttagtagagacggagtttcaccatgttagccaggctcatcttgaactcttgacctcaaatgatccgtctgcctcggccttccaaagtgctgggattacaggcatgagcccctgcgcccggtcgattctttgtctttttaagtcaacttttatatgtgaacaatgcttggcaggtggttggtagatactaagtgatgttcgtggtttggggtcaaggcaagaagtggggtctggagagttttggtgtaattgagaaggaagctaagagtgttgggtgctccagcttggagttagagaggagagaggctgcgacaggaaggcatgtgtgttgtaggggatggcttcccatccaggctggcagcaggagcagcctgtgcagatcaggacctggctgccgtggaagagggtgggaccgccttcagggaagatggatctagcaagatgatgccaaagggtacttattccatcaggagatactgacgagtccttccgccgctaaacctaaggagaataaccacagtctgtgttcctgaagagcacccgtgcggtcaggagggtggaggacatgtggtctttagttccaggacatgtttagactacaggccagggtgtgtgagaagcctagcagggccaggcttggaggagtgaaaggaagacaggtactggggcaggaccagttggacttggtgcaggcaaagggatagcaactgtggtgtaggcacctgagcttgtgctactcaggcatgcattgctcaccagtctatcctgcctcccttcctcctgcagacgcaaacatgcagatctttgtgaagaccctcactggcaaaaccatcacccttgaggtcgagcccagtgacaccattgagaatgtcaaagccaaaattcaagacaaggagggtgagtagggctgggtgtgggggctctggctgtgaactgggagtccctctctgcccaggggagtctcagtcctgtgtgggttgtgctgactttagatctgttttgcccttgcttctccatgtgatctgaagaacgtttgttatcttctacctcagttggccttttgagaaactgggggtagtgctggagctcccctgcagaggacactgccagtaatatggtccgcagagcctctaactgagcctccctccccctcaggtatcccacctgaccagcagcgtctgatatttgccggcaaacagctggaggatggccgcactctctcagactacaacatccagaaaggtaccggggttggggttgctgggcagggacccaagatccccaggtcctaggaaaggagcattgatggcctcaggggttggggagcagttcaaatgacttgtgttttgtttaaaataatgggactgggcacagtggctcatgcctgtaatcccggcactttgggaggcttaggcgggtggatcacctgaggtcaggagttcaagaccagcctggacaacgtggtgaaatcccgtttctattaaaaatacaaaaatcagctgggtgcagtggctcaggcctgtaatcccagcacttcgggaggctgaggcgggcagatcacaaggtcaagagattgagatcatcatgaccaacatggtgaaatcccatctctactaaaaatacaaaaattagctaggcatggtggtgcgtgcctgtagtcccagctactcaggaggctgaggaaggagaattgcttgaactcgggagacaaaaaaaaaaagtcataatgtgaatttttttatcactgcaataaggaaattagtgtcacttgtgggagcgacaagaattcagtgtcctttttttgtgagacagagtcttactctgtcacccaggctggagtgcagtgacgcgatctcactgtgacctccgtctcccgggttcaagcgattcccctgcctcagcctcccgagtagctgggattacaggcacccgccaccacgcccagctaattttttttgtatttttagtagagacagggtttcactacgttggccaggctggtctcttaaagtgctaggattacaggcgtgagccatggtgccccgcctagacttcagtgtctgaccttgcctgaaccacttagaggtcggcttccatgttagaaacccagatggatgcctcagttggcatgtgtcagtctcagactccccccagggctcgtggtcagtgctgagatggagatttcctggggcaggctggctgggacagtgtatcttccacacgtagaacactcgggggatcccgacttggtgtccccatcacacttgagaaagcagcagactataggccctggagggtcctgcccctgtgactgaggagccagggctgggctcagtcgccgtccttctggctgtctcctgcagagtccaccctgcacctggtgttgcgcctgcgaggtggcattattgagccttctctccgccagcttgcccagaaatacaactgcgacaagatgatctgccgcaagtatgtgtgctccgatgcttggggggctgtgggggctgccggagtcggggtatgccctcacccacccctcctgtctctgtgcaggtgctatgctcgccttcaccctcgtgctgtcaactgccgcaagaagaagtgtggtcacaccaacaacctgcgtcccaagaagaaggtcaaataaggtggttctttccttgaagggcagcctcctgcccaggccccgtggccctggagcctcaataaagtgtccctttcattgactggagcagcaattggtgtcctcatggctgatctgtccagggaggtggctgaagagtgggcatctcccttagggactctactcagcactccattctgtgccacctgtggggtcttctgtcctagattctgtcacatcggcattggtccctgccctatgcccctgactctggatttgtcatctgtaaaactggagtaaaaacctcagtcgtgtaattggtgggactgaggatcagttttgtcattgctgggatcctgtcaggcactttgaggtgtccctcaggccttggccctgaagtgtctaggtgtgtggagatgggtagaaaattaggtacacccaatggtgtagaacgttgattctcaaatttttttattttatacaaatggggtctcactatgttgtccaggctggtcttgaactcctgggctcaagccatccgcccatctcagcccctcaaagtgttgggattacaagcaagaactgccatgcctgacccagttctcagttttttgtttgtttgtttgtttgtttgttttgagacggagtcttgctctgtcgcccaggctggagtgcagtggcgcagtctcggcttactacaacctctgcctccggggttcacatccttctcctgcctcagcctcccgagtagctgggactacaggtgcccgccacaactcctggctaattttttgtatttttagtagagacggggtttcactgggttagccaggttggtctcgatctcctgaccttgtgatccattcgccttggcctcccagaatgctggtattacaggcgtgagccagcacgcctggcccagttactcagttttgaatctgaggccgtgacatcactcatggtctgcagtcagtgctctgcccctgagctgtaccctctcctatgataatcactcttaagaagggcaacccttggtgttttccccttaaggtcacccaggctggaatgcagtggtgtggtcatggctccctgtaccctggaactcaggcttgggtgatcctctctcctttgcctccgaagtagccaggactacaggtgtgcacccaccaccacactcagataattgctttggtgtttttaaagcttgtaatgatcagtaggctgaggtgggcaaatcataaggtcaagagttttttagatggggtgagcacagaccaattcctgttttatttactgatttaaaattttgagacagtctcactgtcacccaggttggggtgcagtggtaggatcatagcttgctgcagccttgatctcccaggatcttgcctcagcctcccgagtagctgggactgcatgcttgtgccaccacactcggttaatattttgtagagatggggtcttgctatgttgcccaggctggcttcaaactcctgaacttaaaagcctcctgtttagttttggttttttatcactttttttttttttttttgagatggagccttgctcccatcgtgcaggctggagtgcggtggcgcagtctcggctcactgcagcttctgcctctcgggttcaagcgattctcctttctcagcctcttgagtagctggaattaccagtgtgcgccaccaccaccacgcctggctagtttttctgtttttagtagagacagggttttgctatgttggccaggctggtcttgaactactgacctcttgtgatctacctgtcttggccttccaaagtgctaggattacaagcgtaagccacagcgcctggccttgctacatttttttttttttttttttttttacagacatggtctcgctatgttgcccagaatggttttgcactgggtccaagcagttctgccgcagcctcccaaagtgctgggattacaggggtgaggcaccttgctggcccctgttttgattagggtgcagtgctggtgaagccggtgcacgaggccagtgatgcatcctaatgaggggtggagttggcgggacttcctgggccagtttggggactttcacaaaagacccccatgactcagggttttgagttcttaactgatcgaatgaaggattcaaaattaaccactccaaggggggattgaaggaagaaccactcttaatggacaaaaagaaagaaaggggagggagtaacagggatatgagctctagccgcccaagctagcaatggcaacccttctgggtccccttccagcatgtggaagctttcctttcgcttcattcaataaacagctgctgctcactctcctggtccgtggactctttttgaactgttaacactccccgcaaaggtccgcagcttcattcttcaaagttagcgagaccaggaacccatcggcaggagaaactgactcatcgtgggggctcacccaggatttccaaagcggtaacatcggacctctttcgcttgctactctgctctacttttctttagaattgagggcaaacaccgggcacctgtcggccatttaaaagcgacaagtgccgccgcctgactaaagacacagatgtaagggtatctgagaaagggctctctaacaacccccagcccttctgaatcgagagtgttgttttgcctagaaaccagttcccactttctctgcattttctgggttgaaccgagggctggccaagggtggaaaacagtggccccaagctcctggtaacgcccagtcgagatgacagcgctttgtgaaacctttgttaaacagccacccaaacgcacttcacccacccttcgagaggcatgcctcctaggtccaaacgtctataaggaagactttcttgagaacttgtctccaggattctctctacccccaggatgaaaaccctctggattaggaatctaaaacaattaggatggcaaccctcagatctgtgttcctgatgtgccatggcttatttttttattttttttgagatggagtctcgctctgacgcccaggctggagtgcagcggcacgatcttggcccactgcaacctcaacctcccggattcaagcaattctcttgcctcagcctcctgagtagctgggattacaggcaccacgtgccaccatgactggctaatttttgtatttttagtagagatggggtttcacatgttggtcagactggtctcgatctgacctcgtgatctgcccgcctcgacctcccaaagtgctgggattgcaggcgtgagccactgcgcccggcccccatggcttattctaatgtagatgggcaacaatgcaaatatacaggacctgttccccatattcgacaccgaaggcaatacccaggacaatatagtgtgtgccaatggttactggaaggcttaggccatttctctttctgtcgtccccacctcactgggaaccatttcacctatcatttctcttgtttaggatcagcaatccaaactacggagctcttccactcagggtaccactcgcatttgtgggagttaagtaaaataatagaccatcgactgggagatcaaaagtagtattcttaagatggaaagcggggacaaaaggctgtagtgcatgagacactatttcagccttggcccaatcccctgttgccccccgccttaaaattgctatgtctatgtacaatctttaaggagttcatcttactggggcagtttcaagctcagaaatatgctaactggagccttgtaaaccacctaagaatacaccccaaacttagaacccactcactggaacaaaaactttcgggcgcactggtaagaggccgctaaacccagcagcctggcctccttctttgtggctaagaagggagggaaaagaatgtggttgaaactgctacgtcggtaagcacaattaaatctgataagcagggttccatgggtgattgtgcaccctggaaaatggacactaaaacagtaggggacctgctagaaccagtgtccactgggaatgactaggggtgcgggcatccctatgctttcctttcagatgggagattttccctccaaagtgaagtcgcccctgaggtgtattctgaataactgggaccaatttgatccccagacattgaagaagcagctcatatttttctgcagcactgcctggccacaatatcctcttccaggaggagaacgatggccacctgagggaagtatacactataataccatcctgcaactagatctgttttgtaaacaagaaggcaagtggatttaggtaccatatgttcagacctttttctcattaagggatgataacccacgattgtgtaagacatgtaacctgcaccccacagggagtcctcaaattctacccccatacccagtcctccccacggctcctcctactaatgccaaaccctctctggcttctacagcccaaaagggaacaaataaaagagccttcagagagccaagagaccccactggcccctggctatgtcctcttcaggctgtaggaggggaatttggcccaacccgagtacatgttcccttttctctctctgatctaaagcaaattaaggcagacttggatgaaagttctcagatgaccccaatagatacgtagatggcctgctgggtctgggacaatcttttgacctttcctggagagagatcatgttattgcttgatcagacctaacctctaatgagaagaatgctgctttaacaggagcccgagagtttggggatacctggtacctcagttaagtaagtgatagaatgacatcagaagagagcagtttcctactggccagcaagcagtccccagtatggatccccactgggaccctgactcggatcatggggactggagtcacaaacatttactgacctgtatcctagaagggttaaggagaactaggaaaaagcccatgaactattcaatgatgtctactataacccaagggaaggaagaaaaccctattgccttcctcaaaaggctgagggaggctttgagaaaatatactcccctgtcaccagattccctcgaaggccagttaattttaaaggacaaatttattactcagtcagctgcagacattaggaaaaagctccaaaagttagccttgggccgagcaaaatttggaggcatcattaaacctggcaacctcagtgttctatcatagggaccaagaggaacaggccgaaaaggaaaagcaggataagagaaaggctgcagatttagtcatgccctcagacaaaccttggcggttcaaagaggagaaaaaatggagcaggccaatcacccagcagggcttattatcagtgcagtttacaaggacactttaaacaagattgtccaaagagaaataagccgccctctcacccatgtccactatgccaaggtgatcactggaaggcacactgtcccagaggacaaaggttctctgggccagaagtccccaaccagatgatccagcaacaggatggagggtgcccggggcaagcaccagctcgtgttgtcaccctcacagagccccgggtaagtttgaccattgagggccaggaaatcgactttcttctggacactggcacagccttctcagttccactgtcctgccctggatggctgtcctcaaggtctgttaccatccaagggatcctgggacaacctgtaaccaggtatttctcccgcccccttagctgtaactgggaaaccttaattttctcacatgcctttctcatcatgcctgagaatcccatacccttactggggagggacatattagctaaatcaggagctatcatctgtatgaatacagggaagaaaagacctatctgttgtcccctacttgaggaaggaatcaaccctgaggtttgggcattagaaggacaatttggaggggcaaagaacgcctgtccagtccaaatcaaactaaaagaccccacccctttcccttaccaaagacaataccccctaagacctgaagctcgaaaaggattacaaggtattgttaaaaatttaaaagcccaaggtctagtaagaagttgtaacagcacctgtaacaccccaattctaggggtacaaaaaccaaatggtcaatggaggttggtgcaggacctcaggctcataaatgaggccataattcctttatacccagctgtacccaacccttatagattgctctctcaaataccagaagaagcagagtggtttacagtcctgaatcttaaagatgcctttttctgtatccctctacaccctgactttcaattcctatttgcctttgaggatccctcagatcaaacatctcagctcacctggacagtcttgccccaaggatttagagatagccctcacctgtttggccaagcattggcccaagatttaagtcacttcttgcacccaggtaccctaattcttcaatatatggatgacttacttctcccgttgagagaccctgtgccatcaggctacccaagactttttttttttttttttttgagacggagtcttgcactgttgcccaggctggagtgcagtggcgcaatctcggttcactgcaagcttcgcctcctgggttcatgccattctcctgcctcagcctcccgagtagctgggagtacaggcgcctgccaccacgcctggctaattttttgtacttttagtagagacagggtttcaccttgttagccaggatggtctcgatctcctgacctcatgatccacccacctcagcctcccaaagtgctgggattacatttgagcccaaggccttttaaactttctagctgatcgaggttacaaagtatctaaatcaaaggcccagctttgtttacagcaggtcaaatacctagggctggttttggctaaaggaaccagggctctcaacaaaaaacctatccagtctatactggcttatcctcaccctcagacattaaaacagttgacagggtttcttggaataactggcttttgccaactgtggatccccagatacagcgaaatggccaggccactttacactctaattaaggagacccaaaaagctaatacccatttgatagaatggggaccagaggcagaggcagccttcagaaccctaaaacaggccctaacacaagtcccagttctgggtctacctacgggacaaaatttctctttgtatgtcacagaaagaatgggaatagttcttggagtccttacccagacttgagggactaccatacagccagtagcatatctgagtaaagaaattgatgtggtagcaaaggactggcctcactgtctgcaggtggtagctgcagtggccattttagtattagaggctgtcaaaataatacaagggagagacatcactgtatggactattcacgatgtcaacggcatactaactgctaaaggaggtttgtggctgtcagacaatcgcctacttaggtaccaggccttattacttgagggactggtgcttcagatgcgcacttgtgcagctcttaacccaaacttatgctgcccagaaggatcttttagaggtccccttagccaaccctgacctcaacctatatatatactgatggaagttcgtttgtagaaaagggattacaaagggcaggatataccataggttagtgataaagcagtagttgaaagtgggcccctcccccagggaccagcacccagttagcagaactagtggcgcttacccgaactttagagctgggaaagggaaaaagtataaatgtatatacagagagcaaatttgcttatctagttctacatgcccatgctgccatatggaaagaaagggagttcctaacctccggaggaacacccattaaataccatgaagaaattatgaaattattacaggcagtgcagaaacccaaggaagtggtagtggccttgcactgcaaaggccatcagaaaggcaaaggaaaggaggcaaaaggaaatcgctgcacagacgctgaggccaaagttgccgcaagacgggacctcccattagaaacacctatggagggacccttggtatgggataacccccttcaggagaccaggccccagtattcccctgcagaaatggaatggggactttcatggggacatagttttctcccctcggggtggctagctactcaggagggaaaggtgcccatacccgcagctaatcaatggaaaatacttaaaaccgttcaccaaacattccataggggtattgagaatacccatcaaatggtcaaatctctgttcactggacgagacctccttaaaaccatccggcagacagtcaaggcctgcgaagtgtgccaaaggaataaccccttggtccattgccaagcccctcatggagaacaaaggacagggcactaccctggagaggactggcagttagatttcacttatatgcctaagtcacggggacttcaatacttactagcctgtgttgataccttcacgaattgggttgaagccttcccctgtaagacagaaaaggcccaggaggtaatcaaagccctggtccatgaaataattcctaggtttggacttccctgtagtttacaaagtgataatggcccggctttcagagccacagtgactcagggaatttccaaggcgctagggatacaatatcaccttcattggccgggcgcggtggctcacgtctgtaatcccagcactttgggaggccgaggcaggtggatcacgaggtcaggagatcgagaccatcctggctaacacagtgaaaccccgtctctactaaaaatacaaaaaatttagccgggcgtagtggtgggcgcctgtagtcccagctactcgagaggctgaggcaggagaatggcgtgaacccgggagatggagcatgcagtgagccgagattgcaccactgcactccagcctgtgcgacagagcgagactccctcaaaaaaaaaaaaaaaaaatcaccttcattgcgcccagggaccacaatcctcagggaaagtcgagaagattaatgaaacactcaaaaggcactcaaggaaattaacacaagaaactcacctcccatggaaactcaccctcttgcccatagcattattaaggatcctaaattctccccacaagataggactcagtccttatgaaatgctatatggacagccttttctcacaaacaacctcttacttgattgagaaactgccaacttggtcaaggacataacttctttggctaggtaccagcaaatcctaaagacattacccgagggatgccaccgagaaaagggaaaagcatcgttccatcccagggatctagtattagtcaagtccctcccctctacctccccatccctagatccatcgtgggaaggaccatatttggttatcctctccactccaactgcagtcaaggtgattggagtggagtcttggatccatcacacctgaatcaaaccttggatacagcctgaaaaacccgcagaatcattagcttgggaatctaagagtcagccagacaaaccttcttacacccacgagccattggaagacttatgtatcctctttcagaaggaaaattaatcagtgctcataagttctacctcagttcttgttttaaaaacagaatgtactctaacatcctaacattccttgcctttgcccaagtcttaacctttccccgctcaatgtcttcccctaatcttgagggaattattattattattattattttttttttttttttttgagacagagtctcgctctgtcgcccaggctggagtgcagtgacgtgatctcggctcactgcaagctctgccttccgggttcacaccattctcctccctcagcctcccaagtagctgggactacaggcgcccaccaccacacctggctaattttttgtatttttagtagagacggggtttcaccgtggtctcgatctgctgacctcgtgatctgccctcctcagcctcccaaagtgctgggattacaggcgtgagccaccgtgcccggcctaccttgagggaattataaacatgtcctccaggtttttatttgaagcacttcccaatcagagtaactcatcctgttgggtttgcatgaaccctaatttcccccttatatacagcagttccggcccccctcaacatatgggtggaaagctctgaggcctcatacatagctaacacttctaagggtccaggattttttcatcctagtgataggtccaatttccctgacagggctcaagcagccttaaaagcagccgccgccattctccgacaattcgctctatcagctatcccaatcataggttctgtgggcacaataacctccttctcttcgcctccactcctttgtatctcccatcaagtgttcccatgatcacaaggtgtgggacacgtggctggctgcaactatagcttgccttggatatagagttcaaatattctaattcttacagtacgactactggcaccccaatgttttgtggaaataaacatgagttccttggaaaccctatttcagtcacctatcccttaagatttaccaccccaagccaaataattcccccaccagaggccaaaacaacaagcaattactgctggggcagacttccttttgcccaggatatccccctcctgggacttggttcctctctcacaggcaaagggttaaaaaaaccccattgcttcctgcttcctgtctggggtgcgcgagtttttctttttgttgttgttgttttgttttgtttttgagatggagtctcgctctgtcgcccaggctggagtgcagtggcgcgatctccctcactgcaagctccgcctcccaggtttgcaccattctcctgcctcagcctcccgagtagctgggactacaggcgcccaccaccacacccagctaattttttgtatttttagtagagatggagtttcaccatgttagccaggatggtcttgatctcctgacctcgtgatccaccagccttggcctccgaaagtgctgggattacaggcgtgagccactgcacccagccgagagtttttcttaatgcagctagccaccggtttgccttacaggaaccccataatacgtccttggcaaattctattcagctccaactgctaggagtggcccatttgtcctgaaccctcaaatcatgggaatgagaaatgaatttagactgaccacagcccttatgagttttcagctacaggggtgtatagaaccctgataaggagttttctttgtgtgtggaagatccttctatatttgcctccccaccaactggacaggaacttgtactttagcctacatagtacctcctgtgacttattccttttcagaagaggcagtagctgtgcccattcatgctaagcttcagccgagagcaatctcactacttcctctattggctggtttaggatttactaccacctaggaagtggactcacagcctagatgaaatctctctccaacttactcaaatccaggaccaaatagactcattagcagctgtggttctccagaaccagtgagcactagatctccaatctcctcactgccgaaaggggaggaacatgcctttttctgaacaaggaatgttgtttttatgtcaataaatcaggcatagtgagagatggaattaaatgacttcaggatagagctagcagactacatggtgggacaaccgaaactacctcagggttctcacagcctgttctccactggcttcttccatttttaggtcccttccttatgattattctaggagtaacctttggcccatgtcttttcagttccttcatcctttcgtttcttcctgaatagaatcaatgaaactagaaatgttactgcagatggaacctcagatgacttcaaccagcacctattatcaaggacccctaaaccagcctgccggcccatacccggacgttgacacccaaaccacctctcacgaggaaacctcagctacagaaccccttctatgcccctattcagcaggaagcaattagagtggtcatcctcccacaccccaacagcagttgggctctcctgttgagagaggggactgaggggtggagttggcaggatttactgggcaggtttggggactttcacagaagacccctgtgactcagtgttttgagttcttaaccaatcgagtgaaggattcagaattaaccactccaggccgggcgcggtggctcacgcctgtaatcccagcactttgggaggccgaggcgggcggatcacgaggtcaggagattgagaccatcctggctaacccggtgaaaccctgcctctactaaaaatacaaaaaattggccgggtgtggtggcgggcgcctgtggtcccagctactggggaggctgaggcaggagaatggcgtgaacccgggaggcagagcttgaagtgagccgagatcgtgccattgcactgcagcctgggcgacagagcgagactctgtctcactaaaaaaaaaaaaaaaaaaaaacaaaaaaaaaaaacactccagaggaggattgaaaaaagaaccactctcaatggacaaaaagaaaggggaggggtaacatagggatatgagccctagccaccggagccagcaacggcaacccttccgggtccccttccagcatgtggaagctttcctttcgctttgttcaataaactgccctgctgctcactctcctggtccgtggactctttttgatctgtaacacacaccgcgaaggtccacagcttcattcttcaaagttagcgagaccacgaacccatcggcaagaaaaactcccaactcactaacagcctagtcccttcccccttaaaggctggtgtctgtcaccccatacctgagctggtccctcttcactaagtcaggctaccagcatcttcctgctcctccggctgggcccctggaggaggaagctttccaaagctctgtctagcccatgtatccctccagcaggaagctccaaggcctcctctgtactttgaggtcgttctggcccctgctatgctccaggctcagggctattacacaagacacccaattcaactcggtgggctgttgacaccgtccctgtcactgaatcttgtcttcacccctgtgattctctgaagagccagtgaatctctgttaatgttggtggagttccagccactgcactttttttgaggcagactcactgtggctccggctggagtgcagtggcatggtcatagctcatggcagcccccaactcccgggctcatgtaatcctcccacctcagcctcccgagtagctgggactggaggcgggagccaccatgtcgggctaattggtttttctgtagagatcgggcctccctaggttgcccaggcttacttaacactcttgaacgtcaaaacccacgctcagtacccgcttcaagtggaagtcggtgttgagatacaagcataggaacgaactcaaggctaacagctgttctgtattcagagccgcacaatcaaggaaaaacacgatcggaggcgggccctggacgggaacaagaagggtgggcttgactgggcggcccgcggtcttggttcccctttcttccttctggctggccggccgcagggtagggggtccgtggacctcccggcctgtagggggcgtcgggcgcagcggaagggcctgctccggagcctggccagggctgcgcagtcatgatcaccgagaccgcggcggagcctacggtccctgcagtgcctgctgctgaggaggccaccgaagctcggggacgcgaggagccggcgtggccctgggtgagcccaggcccaagcgggaacgggcgcggggcgggcggcgcagacccaggggcgcgggcttcatgccccagccgtgccccctgtcccgcagaaagacgccccgatccggacgctggtgcagcgcatccaccagctgcaggctgagcgcgcgcagggcttccgccgactggaggagtgagtgggggcgcggaggggctcagggttcggtcccccgcccgctccgggcgtgggcgtgttctcggcgggcgtgcctggaggaggagctgggtccttgtgtggctgcagagtcagatggggcggggatttcggggcaccgggtcctcaccttcacgaaaaaggccccacagcacgtccccactacccgacgactcactcttcgtggcttctctctcctccccaagagcaggggtgggcctgtctcgcgttcccctgcgggagtcaggaagcgtccttcctacctaccagtcctcccctctggtgtctggggacacttcctgggggcctttcaggtggttggcgccggtgcagggcctgagagcctgggggcgcggcctcagggtccccacatgccgcagaggccaccgccagtacctgcgcagcggccctgactacgacttcgcgcgctaccggagcacagtgcacggggtgacccaggccttcgccgccgcctcgcgggaggtgctggcggtggaagcagagctgggcgggcctcgcaggcagccgctgctcgccggccacgtgcgcagcctgcaggagctggagcagacgcggctgggcacggtgaggccaccaccccttccccgccgtgtctctaggaccctggccggctcctctcatgacgcacccctggttggggggtggtcccagtatcccatacacagacctcaccccttcctgtcccaccccaatcctctattaaggcttcacttggggattctcggaccttgccctctgctgttcatccccaatttttttcccaagttttgtccttattcccagagcactcccgctttctcccagctccgcctaaatgctattccaagatgcccagatcccgccccaacaatgctccacccactctggttgttccgcgtctagggtcccaccctcaacctcccgtagatacaggcgaggggggtcccaggccacgcctcctccgtattattcctccatcacagctttagttctttgcctatttctctcttgcgatccgcctgctcggccctgcaaccgtgtgtgactggaattcctaggccacgccccccatgagcgacccgtctcagcgtctctttggcctttttctttctggtgttttttttttttttttttttttttaagacaggctcttgctctcttgctctctcacccaggctagagtgcaatggcgcgatctcggctaacggcaacctccgcctcccagattcaagcgattctcctgcctcagcctcctgagtagctgggattacaggcataatttttgtattttgtattttttttagtagagacggggttgtgccatatgggcaaggctggtctcgaactcctggtctcaagcgatccgccctcttctgcttcccgaagtgctgggatttcaggcgtgagccaccgcgtccaggctttttggcctacttttatcctgggtccccgtccctgggaccatgaggcgcaacctaacccacccctacggccaatgcctggctaagacgtcactgttgttcccaggccacgcccacatcgcgctcagcactgcctctggcctgcctgctgtctcctttctgagagagcctctaaactgaatttcggactcttcctacacaaagcactgcccctcgtggttctacccgggcactgcctttctgggtgcctctgttttttcctgaacatccttggagggcagggggtgggttctgctcgtggagacatccttcgtgttgctcattcccccaccaggtggccctgctgcagttgatggagacgccagagctggcggggcaggaggacgctgtacggatgcagcagctgaaaatgaagtgagcgctgctgcccaagccgcctggctatgctcgatttgcaccagggttggcacggtcaggacgctgccagcagaggaaccctctgccagtgcacaatggtgttctcacctggtggccctcagatgtacacttccccagagggcacagccgtgaaacttcacatcagtttcgctgtgcattgctgggacactgctgtatacctcgacacatgccaatcctgcacacgtggctgtccgtggagcttggacatgccccactgagcacagaccttcagatgcctgtcctcagcccccaagcacacacactcatgtacacacacatttgacaaagtcacacttcataacctcctaatggtacacaccccaccaagatggccttttcttttcttttttttctgagatgcagtctcactctgtcaccaggctggagtgcagtggcgcgatctcagctcactgcaacctccgcctcccgggttcaagtgattcccctgcctcagcctcctgagtagctgggactacaggcgcgtgccaccacgcccagctaattttttgtattttagtagagatgggtttcaccatgttggccaggatggtctcgatctcctgacctcgtgatctgcccacctcagcctcccaaagtgctgggattacaggcgtaagccagcacgcctggtcctttattttcttttcttttttctttcttttttttgagatagagtcttgctctgtcacccaggctggagtgcagtggtgcggtcttggcttaccgtaacctctgcctcctaagtagcttggattacagatgcccgccaccatgcctggctaattcttgtatttttagtagagacggggattcgccatgttggccaggcttgttttgaactcctgacctcaggtgatctgcctgcctcagcttcccaaagtgctggattacaggcgtgagccaccatgcccagcccagatggccttttctctcagcccactgtgacctatggggccaccccttctccctagcacctaagtgttccctcttgctgctagtgctgcctggaggtttggcggcgggcaggagggcctggggctcaccacagccacagccctcttgcagcttcgcggcagcagctaattcaccccatctgggttttatttatagttcccatccgctcttgtagggtaattaaaaccatggaggcgatcagcgaggttctccaggaccttaggtttgatgcggaatctgccgagtgatggcggctccccagggatgcgccgagggagatgggaaacggggcggatggcgcccagcccagccctaactgccagctggctggggttgcgccccactgcgctgctgaccttcctgcagttccagacacctcccacaataaagagctcctcctctgtagccgctctgccatctctgtgtacaagggtgctgcagccagtgtgcctagggagggggcccccacagggccagggattgtgggtagaagactcccaccctccctagaaactgaggtttttttgcttgagacagggtcttgctgtgtcacccagactggagtgcagtggcgagatcgtggctcactgcagccttgacttccccaggctcaagcagtcctcctgcctcagcctcccaagtagctgggactacaggcacatgccaccacaagcccagttaattttttttttttttgagatagagttttgctctttttgcccaggctggagtacaatggtacgatctcggctcactgcaatctgcacctcctgggttcaagtgattcgcctgcctcagcctcctgagtagttgggatcacaggcatgcaccaccacgcccagctaattttgtatttttagtagagacggggtttctccatgttggtcaggctggtcttgaactcctgacctcatgtggtccacccatgtcaacctcccaaagtggcgggattacaggcgtgagccatggcgcctggccaattttttgcttttagtagagatgaggtctccctttgttgcccaggctggtccccaactcctggccttgagcagtgctcccagcttggcctcctaaagttctgggattacaggcatgagcctttgcagccagccagctcaggtattttgaatcacattctccaaggagttcagaatcagaccttgcaaatactggatagacagtctgaagtcctgggaggtgaaaattctaatctcaaagggtcattaagacgcctcacattcccctcaaatctcacagcccccaccccaggccaggcaggccccaaactcaccttcacaatcacagcacctaaatagctcatttatttaaaaggactcttttggaggggccctaggtaatggggagtaatgactccccttctcacccccagccctggcaggggttctaggcaactcaaccaaccctcacacacacacacacacccactggggtgcacccaaaggtggcctcacgtgggagtcagagctgttatggccgttggagctcaggggccaccccagctcctgctgagggtggctcaggtgccctgaagtgagggtacagaggtggccccagtttgggttcggcctctgcgtctccacgtggcagggagggtggcctgagcccctacagcttatctggcaggacctgcaggcagaggggaagccaagctaagcagggagtccaggagagggccgcaccacagagccactgaaggaggcttcattcgtgtcctgtccccaccgcttctggctgtgtgactttgggcagggtcctgcccctctccgggccttggcgaggctatctgagctgcaggtaaagcacttggcgcggagccagtatgcagtaggcgcccatgcgtgctaactagggtgagtatgttcattcatttcggaggagattccacttcggacattttcagggcattgaatgttcttaggctaaaggagacaatgccagttatacagtaagtgctaagtaaatgctgatgaataacaaaggaagaggacggattccatctcagcgactctaaggctggggttgggaggcgtgggggtgtgaacaagacctgcagccaccggaaggggccctccccttgctccctcccgcccacccattcaggcccaccttacctctcgccgtgccccgtctgcccgagggcaggatcccctcgtcctgtgcttggaaggaaggcagaggtgtcgtgggggctgcagacctgcgtccacagcctgctgtcttccccctcccctgttttctgggcccccccagctccctgtccccacccccacgcccgagggtccctccttcctacctggttgcgggtcttgtgcgacttctgcatccaggctcgccactggtcgtagaggcggaagctgaggttggagcagtacgcgtgcttcttgagccagcccaggaactgcttgagctcgcgccgcaccggccccgagctcggctctccgccccgcggttcgcacgccccgccgcccgggcccgggcgctctggtggtgggcggagcggcagtgtcagagcgcgcccggcagggggtgcgcgcgggcaggagaggggagaccccggcgcggcgggaccatgctcccctcggggaacctccctccccgtttctcaaggaccgagtcctccccgcggccctgcacagcagcccagctgcgcccctggcccggctgcgcccctggggaggtgggggggagggggaaggaaggggctcctcctccacatctcctccaggaacccgattcctgtggcctgagccaggtgcgagtggagtggggggaggggagaatgagagaggccagagccggggggatgagacatagagatagacagacagagcagggggccgaaaaagagaaagggagaaagacgcacggatgagagagccggggccagggatggagagatggagacgcagggtgggtgaaagccaagggtgtcagcccaggaggaaagggcctgatcagggtaggacagaaaccctggggacatagggacaaagagatcgagacagagacacagaggaagagtgacagatgaagggagaccgagtgcaagatgaccccatgggactgtccccagcatgggcccatgggacagggagtgggccaggagggccaggtgggaggcctgcctgtcggtccagctgccggctgcagccagcccccagcaggccggcggataaggacatcggcctcacgtcataaataaagccggggacccgctgacaggccctggcacggccccggcccccgccgcccctgctggccttccccggcctccccagcctcccctgcggacgcagcggcctgctggctcctgtgcaagaatcgcaggtgccgggcacgagcaggggccaaggctcaggcccctcccggctgcgcttgctcccgcccacccctgaacctggaggggcccaggataggggctggggagctggctggagcctgactctacccctccctagctctgggaccctctctgggcctcagtttccctatcatctcacgagccagagtgagcttggtcttcccggtgaactaagtttagacctgtgtgacctcctagagcctcagtgtcctcacctgagaaaaagcggcctcccttgcagtgaaaccctggggggatgggacaataagtacctccatgccaactgcctgcaaacacttaggtggcacccaccatgtgggcacttgccacaaattatgtcatccaaccctcataacagcccaaggcaagtgggattctcgaccccaccttccagatggggaaacggaggccagacattccaagtaacagctttcgtttcatttcacaaaagagagactagaggcctgtggacccggagaaatcccagacagcaagaggaagcagacctaggcacctaatcattcccatccccctgccttgatcagaaggagaaattgaggcccatcaaagtgggagttggcagcccattggccttagaagcaggggtctcaaactcactggccccctcttaggagggagtctgagtggccaaaacagaccagatggggatgggcaaatggagagtgagggtcctgagaaggggagaccactgctggtgggggctgtaggccatgctgttacattttctagataatttatttttctagggaatctaggatatttgtgtaaaaacttcctgggtttaaaatttctactagttggtcaaactttttttttgttttccaaacaacaggccaaagaaaatagatccaagggccacattcagctctgggggggccaccagtttgagacttctactctcttggagacaatcaggaaacaggctgggcatggtgtctcacacctgtaatcccagcactttgggaggccgaaatgggcagatcacccgaggtcaggagttcgagaccagcctggccaacatggtgaaatcctgtctctactaaaaaatacaaaaattagctgtgcatgttggcgcgtgcctgtagtcccagctacttgggaggctcaggtaggagaatcgcttgaaaccgggaggcagaggttgcagtgagtgcagatcacaccactatgcgacagaatgaggccgtgtctcaaaagaaaaaaaaaagaaaagaaaacaaggaaacagaggctctagctggtttcggactggccgctggatcacccagccctaggagggtgctcaccactgcggggagtggaggcggctgtggggtggctccactcactccagatcccggctttcttggagccatagatgccaaaggggttgcagcgcacttgcacgaagtacacggtgccgggtttcaggccggccaggcggcaggaggtctggttgctcacatcgtccaccacctggacagtgaggacaaggtcagagtagagggcggggcctagcaggagcgggggcggggcctggaaggaacaggggcggagtcagggaaggggagggtcaccttccagtccacactgtcctccactcggtagcggatctggtatttggcttgaaagaggaaatccttgagggcgggtggcgacacccagcgcacgctcagctggtcctccaggcccccgacgcggctcacgtgcacgtcgggcggggggtccgtggtcactgcggggcagaggagggaccctctcagcctgggactgtctgggtttaactccccccagcagtgtggcccagggcacttggcctagatggaacctgcctctgttttcctcctcttccctctgcccccacccccaggactggtggattacacgatatataatattggagaaacactcagcacctaattaatgttagctgttatcaccattattatctgtgacgggagaaacataatcctatcttcaactgactatgggaaagcagccattgcggggttgatgatattattattatcatgcttaggaggccaggggctgtcaggccgtcagccttctgggaacctccctgccaccccctccccactcacacctcccttccactcttttttttttttttttgagacggagtctcgctctgtcgcccaggctggagtgcagtggcgggatctcggctcactgcaagctccgcctcccgggttcacgccattctcctgcctcagcctcccaagtagctgggactacaggcgcccgccactacgcccggctaaattgtttgtatttttagtagagacggggtttcaccgttttttagccgggatggtctcgatctcctgacctcgtgatccgcccgcctcggcctcccaaagtgctgggattacaggtgtgagccaccgcgcccggccctcccttccactcttactgaaatctttgatgtgacattttgctgggtgcagagaagcaactgaggcttagaactttcccactgtagcgttaggatgtggggaagagtgaggcaggctgcgggggcagggatgggggctacaacccaggcgtatgtgtgtgttggggggttctgaggatccttctgggggcccctgagggcagcagggtgagctggcctctccccctgaggccttggtgaggggcctaaagggttaaggcacaggcctgcttggggctgagaaacaccctaattagattaggctcaattctgctcacagatcatccatttcctgcctcccgccctgcgccccccagctccaggcctcggcttcctggggcgcctcccgacctgggcgccccctcccctctccccagggccccctcctgcacacctgggctgccgagggggtggtggccaggccaggtgttctctgtggagtgggggtatcctggctgtttctgggggctgcggactgatgagcggatgctcagctacttacctaccttccctctgaccagcagggacaacccgggagttgccgggctggggaggggcaggtgggaccctaggaaaaatgagaaggtgcaggggacccctcgggatgctcggtgggtggggctggtgccgagggaggggcctagcagacactgggggctcacccacatccaggatatccagcgtgagtacatcggagcgggcagagcccaggcggttggtggcctccacccagatctcatagggcgtaaagagagccaggtccttggggatgtggcaggagtggggccccactgtgtggtactcctcacatgtgttgtcctggccataccacctgcggggatgggagggcgacaggacgcatgagggttccttgtggcccccagacctcaccatggcagcctcagggtgcagacaacacatgggggctcagagagggtccgcgttggtcaaggtcacgcagccagcctgggacacacacatcgccctcaggccaccaccaacctaagcttgtacttgagggagtagttggtgtggaggaaggtctccccgtgggcccctggcgtccagcggcaggtcaagtccttcatgttcttggaccagcagctgatgttgacgggtttctctgggggcactgggagaaggggagggtgcaggaagcaggctgagggtctggactagctgagcctcggctgaggggttgctgcccacccaccaggcccccaccttggagtggaaggagggcagacaggacagtctcagccctgtgctgagaaatgccagcacagttggtgtgacaactgcaagggctcttgagaggctggtgactcgatctccgggttctttttcttttttcgaggcaaagtctcgctctgtcccccaggctggagtgcaatggtgccatctcagctcactgcaacttccgcctcctgggttcaagcaattctcctgtctcagcctcccaagtagctgggattacaggtgcctgtcagcacgcctggctaagtattgtatttttagtagagatggggtttcgccatgtaggccagcctggcctcgaactcctggcttcaagtgatccacccacctcagcctcccaaagtgctgggcttacagacatgagccaccttgcccgaccgggtctccaggttctcattcccacctgaaagacctgcatagccatgccagtgtgcccacagctcatccccaggccagaaggcccacaattcatgcctcactccagagggagatgccgctcccaagagctacccctggggtgtcctgggtgccaacttacggccaacatagaggcaggagccagccaggatgctgccgtcacgggcgtggcacacgaggttgtcccccgaccgctgcctggacccattgaggttggccagggccagagccaaggtggaggcgttgagtacacgggagagctcagggggcaggcggcgcccgttgagggtccagtagaggccctcggcggtggctcctggtgggtctccgtgcactgagcaggtggccagcagggaggagccgatgagaagcgtgggatcctggggactgatcacagctgtgtctggggtcaaagaggaacacgtgtcaggccagggcggggaccctccaagcccccaaccatgccaggacctccagggttcatggtggtcctgaaaagacgctgttaatgattgtcccccattttacagatagggaaggtagagatcagttgggttaaatgcccagggcaacactggtggccaaactgacagacctggagttgtccaggtctgtctgactccaacactggatccttccaaaactcttcatcactgacatgcttaaggttctctgaggggtcacacaactcgggcatagaggctcattcggatccaagtgactcttgcttagcacatcgttatgacaaacactatgctttgctttttttttttgagacggagtctcgctctgtcgcccaggctggagtgcagtggcacgatctcggctcactgcaacctccgcctcccgggtccaagcaattcttctgcctcagcctcccgagtagctgggacttcaggtgtgcaccaccatgcctgactaacttttgtatttttttttttttgagacgcagtcttgctctgtcgcccaggctggagtgcagtggcacgatctcggctcactgcaagctccgcctcccgggatcatgccattctcctgcctcagcctcccaagtagctaggactacgcgcccgccaccacgcctggctaattttttgtatttttagtagagacggggtttcagcatgttagccaggatggtctcgatctcctgacctcatgatccatccgtatgggcctcccaaagtgctgggattacaggcgtgagccactgcgcctggccaagttttgtatttttagtagagacggggtttcaccatattggccaggctggtcttgaactcctgacctcgtgatccacctccctcggcctctcaaagtgctgggattacaggagtgagccaatacacccaggcatgctttgctttttatttttttagcgacagggtctcactctgttggccaggctggagtgcagtggcacgatcatagctcactgcagcctcgatctcctgggttcaagtgatcctccctcatctcagctcccaagtagctgggactacaggtgtgcaccaccacacctggctgatttttaaatatttttttagagatgaggtctcgctagtttgctcaggccggtcttgaactcctggcctcaagcgatcctcccaccttggcctcccaaagtcctgggatcacaggcatgagcttcggtgcctagccttctttatttttcattctcattttgtttttcttttttggcaactagaaacaaaagattgtgggttcttcctgtgatgctcccagagcctcacacatagtaggtgtttctgtgggggaagggcactgcttaaaatgaaagccctgacccttacttgaatcattaagagcaccatgttttttttttttttgagacggagttttgctcttgttgcccaggctggagtgcaatggcacgatctcggctcaccgcaatctccgcctcccaggttcaagtgattctcctgcgtcagcctcccgagtagctgggattacaggcacacatcaccgtgcccggctaatttttgtatttttagtagagatgtggtttcaccgtgctggtcaggctggtttcgaactcctgaccttgtgatccgcctgcctcagcctcccaaagtgctgggattacaggggtgaaccaccgcgcccagcctgtatttttagtagagtccaagaatcgccatgttggccaggctggtctcgaactcctgacatcaagtgatccactcgcctcagcctcccgaagtgctgggatgacaggcgtgagtcattgcgcctggcctaacagcaccatttattgagcacttgttgtgttctgaatactgggctaagactacctacattttctcggccaatcctgcttatatgttaaagatgaaaaaactccggctctgaaagatggagtttccttgctggaatgagggaaggccatactagttaggcccagattttctggtctccaaagttctgttccacactgcctacctctggaactaaaggcagccctggcaaactgcacgtccccaactcccatccaaagggacttgacatcatcgctgtttccctccactcagttttcctcatctgcaaagtgagaacgagaaagctctttgtctcctggggtattgtgaaagtcagaggggaaaggacttcctgaaccaggttgtgtgtgagtcaggtactaggcacaggaaacttggggacgcccatgggtggttgatgcctctctctcctgctggccatcagggcagcccaggagttccccttctggagaccagaaccttgtccatagggaaaccaaggcccagaggaggagggggtgcacaggccaacctcccaatgcctctctgagtctcagtttccccatctggaaagtggacatcatggcgtcaatgtcatggggttggctgggtgcggtggctcatgcctgtaatcccagcactttgagaggctgaggtgggaggatcacgtgaggtcaagagtttgagacagcctgggcaacatggtgaaaccctgtctctaccaaaaatacaaaaattagccaggtggggagggggtggtggccccatgcctgtggtcttagctacttgggaggctgaggcaggaggatcgctggagcccgggaagttgaggctgcagtgagccatgactgcaccactgcactccagcctgggtgacagtgagaccctgtctcaaaaaagaaataaaaaatttagatttaaatttataaaaaccaacaaaacaaacctcatgaggttgtttgagaggagtgaaaatattgttggagacaatattttcccatgagatctttaaaccaagttgacctggactcgaatgcccccagcctgactcagtgttctacttttttttttttttgagacagagtctcactctgtcacccaggctggagtgcagtggcacaatctcggctcaccataacctccacacccagctaatttttgtatttttaggagagacggagtttcgccatgttggccaggctggtctcgaactcttgacctccagtgatccacccgccttggcctcccaaagtgctgggatgacaggcgtgagccactgcacccggcctcagtgttttacttctttgagcctctggaaaggggcttctcgttccacacagagtggttgtaaagactcatccacgcctttgttcgttcacgcgttcatctattcattcacagggtacctatagtgtgtccggatctgtgggcactggggtgatgcccaagacacacaaaagtcctgcccttgtgggcatcaaatccaaggaagcagcaggaaaaaggaataaataaatatctaagacaataactaggggagaaagtaaagcaggggctggaggaagacagagcagcggcagaagcttgggaggcctgtctggggaggtgacctttgagcagagacctgaataaagtaagagaagtagctgtgacattatctaacagagcatgtccaggcagtgggagctgcaagtgccaaggtcctggggcagaagcggtgggaaatgaggtttgagaggtcagagaccctgacctgcagggaggagggattccagggttctcagccggggagggagggatgcggtgagatatgcgttaaaaggactccccaggcggctggaagaagggactgcaggaggcaggggcagcccagcttcgcagagatggcagccaaggacagggtgatcctggcccccagggaggccccctgaatgccagcgctgccctgcacttgccctcactgccccagatgggcgaggtggggtggacacggttcttgggccggccctgatgattttccggggcaaacttggctcgagggctctgtctcgctggagcctggaatcgcagttgcgcttggggcttggcccagggctcgccggaggtctccgcgtccgtgcgaaggagccggctgagcgggccagagccgaggaggcgggggcggccgaggggggcggggggctgggggccaggggaccgccctggaggtcccaggcagccagccgcccgctaattcggaattccttttgcatgaactcgggtgtgccagcgtctctgccccggcccacccaccgcttcctgcctgggcccccccaacagagtgggaggcacggccaggcctgcccagaccccaggcccctctcagcccttctagagtgggtctcactcctcctgcccccaccacccgccagcttggcctgggcaggaaggggctctctggggggtcctggctggggggcgctgcccctctgccacacccgcctggcctgggccggcgtggctcacttgccagcagctgcagctgccctcccggggctgggcgggggacaccgggcggcgacgggttgtagggggaaggcaaggccaggcgggcctggacagaccaatctcccacccccttagccccagccggtaaggtcagaaggacactttctcctcccgggatatgggcgcaacaccagtgggagaacctggccaattgacttcccctctccagttctcaattttctcctccataaaatgggaggagaaatacgttctacttgctggggagatcaatgagatgtgattgcaatccaatgtccagagggctcagaagcctgaagcccccaggagctgcaaagatgacagcccctcccagctctggggtcccggctgactaggcactccctccaggcctccacaaacaatgggctaaggcgctggggacagagatgcacgcactccaggccaggcaggggagcagctgggaacagcccactgagccggagttggtgggggcttggcttggtttggagggcctcctagggctccccaaagcagatccctaggttgggcttttgaacagctcccttttcactccctgcctcccctcctttcccgcagagctggggcctttaaaagttttttctctcctcttttcccaatctggagccactgccgttattaaaaaggaacaccatgtgttttaaaagggaaaagtgtgagattctctgcaagcagggcggaagggtggcctccatcccagggtccccacgggggtccccatctcccgtcccgctggtacctgcagacactttacgacccacccgcctgctggtcaggtgctaagacacaccgtaagtagaaacatattgccgaggtgtgagaatcttttatttaatttcttccccccttaaaggaaaaaacacacttacagtgcccccccaccccctacaccttcgcctgctgctctactggctgaaaacaaagcttggcgctcacagtggcactcacaggcgctgcccaccgcctggcagagccgtcaggggccctgggagggcccgaggtagcccctcacctgaaagccaggggagagccaggctttcagcaagtgcccctagaagatgcccggaccctgccccttcccggaggagccctacaggcagcccgcaaacagcccagcacagggtggatgagcctgggagcagtgtgtgcccggcgacccccggggtggcccgtgcgcctggatggggtgcgtggagtgactgaacatctggggcgagtggtgcctgcctctgtgcccctgggtcgcctcccctgtgggatgtgtgtgaccgtgaatgtgtgtgtcggggatggaatgtgtgtgcgtccgcgatggtgcgcgaatgtgcacctgggatgcagtgtgcgcgagtttgagggcgagggtgacgggccacaagccagtgtgattctttgtgtgtctctgggtgtgtcccagagcgggtctgcatacggagacgtatccttgcgggggtgttccttggatggggggccccagagtgcctgaggccagaagtccctccagggcaggggtcttggcccgtagggcagcgggttcccagtgggccccctcaaagtttgggcccgctggtgcccggactcactggctcccgctccctctccctctcacccactcgctcacaaagattcctctcgctggaggctctccgcccgacgcagcctggctgaaaacggttctaagcgccgccggtggcggggactccgcggacccccgtgcgccgggtcccgcagggggagggcggtggcgccggcccgtggagacacaagtcccccgggaccccgggctgcgcgccaggcggccagagcggcccccctgcagccccgccctccccgtggggctcatccctccgcctgggggggcccgctgggggcccgcacccagcgcgccaaccgcgtgcgcccccgcctgggagcggtgccctgcagtcccaggggcccagagtccaccgaagcagacgcgtgcgcccgccacgtcctggcatgcagagggtctcaggccgcgatccccccagcccccgggggcctggcctggcgccctcggcccagctgcccaggtaacagggcctcgggcgcggaagcaggactctctggacagtggactgcggcgccgtgtgccccgcaggtgagggcgccccgagggctgcgccgggggcgccttcctttgttccccggccgtccaggtggcgcccgcgccccctccccccgcggctgcccccggggcgcccgccctctgctctggcaggggggaaggagtggggcgccgggtactcacgggctcctgatccggctcgcggcgccccgaggacgcagagcagcagcagcaggggcagcaacggcggcggccgccgcgcggattgggcggcggggccccggcggccggcgggcatggggccggcgctgccgggggcgcgcggcgggctgcggctcggcggcggtggcgcagggcgcgggacgcaggccgggcgcgggagggcgcgggccaggccgcccgcacgtcgctgggcgcggacgcggaggccggagcaagtctgagcagccgaattgacaaggcgctaatgcgccgctggccccgcccggccccgcccccggcccggcccggccccgggggggcggcgggccccgcaccggcctccccgccgcccgcccgcccgcgggcaccgcgcgccccgcccgtcccgcctccgccccaccgagaaccgcgcgcgccctatcccgcggcccaaagccccctaactcaacccctaccggcccaggacctccctctccaaccctgccagctccaggcttcccacccccagtctgggacccggcacccccaatcccgtttccataaccctgcccacttccctgcaccctcctctcagcccagtgcctcttcagtggcccctttggtccccaaccctgccccactcctccattcccccttccacggcccaatcttctgtctcggcccccaccccagctctggccccgccccccccaccgagcggtccttgagtcccgcctacccccatctccagcccctcagccttcccaggggcctaaaagtcacccccagccccacgccctcggcgcgcgggttccagccctcccacctcatcctgcctcttttcgattctccgcgagtagcctcggccccaggctttgctggaagaaaggagaaaaagcaggaaggcacggagtccctcgccttcgccctggctgcgctgtccccttcgcgcgcgggatgggtttgaggttgctctgggcgccccgggggcctcgggagggagctcctgcgtgggcagacggggagatgtagtcccctgtgggagccgggacccaggcctgcgcgggaactgggtcccgcaccgcagtaagagggattcccaggaggagagcggtaagaagctctttccccgggacctattcacaccccgccacggaaaaatccactcagcggcccgcgggtggggtgcgccacgcggtgagtaatcgcttcggcggccaccgcccgccgactccaggtaacgccggctgcccggagcgacgcatagtttgtcttccttcttttgcgcaaagagccttctccgtgttattatttttggccattgctcgagtttcgggacccctcccggtccgggcgtctcatctccctcctcccggtccccacccgatgcgggcgcccaggaataaagggttcctggcctccaaggctgctgcggatgggggtgcctgaaatgagagttggggggtgcaattacccacttttggtcgcagccccgcccccagctgcagcgcccagggaagggaacggctccaagtccccttttccaggagtcccttagaggcctggattctctctcctggtccccaaccagccaagggggtaaaagtgtctgaggggggctcaggagcccccatttgtctgcccaagactgaagccccaccctctcctacttaaatctccagttcagactccagactgtcaaaaaacaagattgggggatgggagcctataggggcccagggcgcccctgctccatctgaattctggatggagaagacagacaaggagagacgctgccatttacttcgggaaaccaggccttttgtgcctcagtttcttcctctgcacagtgggcaccacccagtctaggagcttctgtgggaagacgcagggcagcagaagtctctacaatccaagcccttagcacagcactggaggatatcctggagcagaggtgacccccagccctgcttgtcccctctgaaacatggagccatagtcccacctgccaggggacccagagggttaagtggaggtggcagtccttggctggaattgagtttttaggatactcaccactactcccccatggctcctgtctgcagatgctctctgtgtggatagagacgcctcactccctcctgggaggacttcaggcttctggagcaaaaccttgattttttcctccctccatttctgcttctcttccagtcattttggttttgggaaagggctctcccatccatccaggtgctcaggccagagacctggaagcgcacgtgacaactctctcctttgctcatccctcatgtccaattcatcagcaaatcctgttggctctgattctaaaacacatctccattctgagatgctgacccctttttcccaccccattcagatccaggccccacggtctccctcagggatgcttcccggcctcctccagggcctccctgataacccttctgcctttctcggcacaccaggcagagggagcttttaaaagaagaaaaagcagatctttgtcctgccaccctctcgccatcctctcccctcctcttcttccctctcctcttccccctcctctccctcattccgccccagccactggagccctgtttcccaaaacataccaggcttgttactatagaagggcctctgcgtgttggctgttccctctgctggaatgctgttccccacatcttccccagttggccctttctcttccatcacttcacaggattagtgccacctcctcagagaggccctccacccttcccccagcactctccctctccttcactttgttttattgtttttgaaacacaactcttccaaccatttcatttcttgtgcaactgattttctttagactgtgggcagcctcagcccctttggaccccagtggtgggcccagtgagggctgaaagcgaagcactcactaaatatttgtaaaagtaaaggatggagaactcttactccctccaagtagcaagaaaactcagtcctagcaagtcatgctgcctggggtcctagcctggcccacactctgtgtcttgctgtgtgaccctagccagtagacatccctctcttgttcttaccaacagaagggaaggaccattttccaatcctgcccagccccaccctggagtgtgacttctgcccttgggtgatctttaccccacacctttgacttcagggaaagggaattgaccccagagtgcatccttcccggcccttagggcccccagaagtttaaccctttactccccagttccattatctccttgaggacaaaagggagctagcgtcaatggaacttctggcaaatattgacccaagtccttgaagttggctgggaatgtgtaaggggcagaaggagggagggcctccccttgggcagagggagggcctccccttgggctgggggagggacccctccttagtcctgcaccctccactccaaggtcacctctggatgagaggtattaggttggggggggggcctccatccccagctccctcgtgattccagggcactgagggtgcaccagggagggggcagtggaaatggcaccttcagggtcctgtggggacccacaaccactgggagtgaggaaggctgagagctgtctctcccattctgaaagccccgtgctcagggctccccagtatgggattagctacctggtgttccaggcaggtgctttcaggaattaaggggcagtgagggtctggacacctggttcagggtctgtggcacaggaaagtggggcccgtgtgtacctaggctttataatttctgccctggaggctgagcctggggagaagcaatgcctgggtgctcagtgtaatgcacactggacttcaggcactggaggcgggacctggggagttgcagacctgcctaggggacctgcctgggaagttgcaggcctgccccagggaggccagtttccctgcccgtctgtaccctgagaagcctctgaagtctgggtcccaggaggcaccagctgctttagggggacagccacatccctccgtcctcccccaacaaccctcagcaaccaccaccggcgccatggtgctctgcctcctccctggcctgtaccctgcttggaggtgggggtcagcagggtcgtggtgagggcggcaagggacaaagggtgcttgtccgctgcccgccttgacctcggctgctgtggcttcccggacgcctggcctgccgctgattcacgcccaggccggcctcagcgccccccgcctgccgcccccagccaggccgccccggggggtaggaagtgggggggggggcgagggcggcgccgagtcaactttccctcttaagccccgaaggaatgtcggcggatttcctgaaacccgaccctggccgcccgccggccctcccgcccctcacctggaccggctcccccgggaacagcaggaggggcgcgggggctcaccttgggggccggggtcaagtcctctttccgctcacccccccagcggcctagtgcagcggaaagggggctgggtgtgcggcaatcagcctctttcccttctcccctcaggcgacctgggtgatcgacccactcctccagcctcagtttctccttctgcaaaagggcgcggggtgtccctcctccctgatgcgttttaagcaatgcccaaaggtcacctcccatcattggcagggctctgccggcttttctttgcttctctccctgtcacctggacagaaccactttgcagtctgagcatcagtttcctcacccatataaaagggcaacgctaccggtacctgtcttatacggttgttgcaagaaaaagtgtttcgttggaatgaatgaaagacagtaattgtggaggggttaggcgcgcgcgggcctctggaattagcatgtgtgggcttgaatcctgactttgccaacgcgtcccggagcctaagtttcccacctgtgaaatgggggacagtattggtcataacgcacagggctgtttcccaaggtgcgggcctggcgcgcgggtgggttagaagcggaattctcctgctggattctggcgcaaactgcgggctggaggccctcgccgccgggtcgcagcggcctagcatgggaggggaggggaggggcggggcggggcgggggaggggccgcaccgggatccagatgttcggggtccgccaggcacagccgcgcctgattaagccacgtgggggccggccgggggccgctgagatgaaagcgcggccgcaggccagagtagggggtgcgccgggcccccacccgggacaccctcttcccaggccgaaacctgagccgccctctaacccgcagaccctgcgaggctgccgccccgtctgcgggggcggagcgtaggtgggggacctgcgggctgctgcgcggcgctgcaggcacctgcgccaggcatgccagcgaaagcgggggcatctttgcagaggatccgggtttagaggggcgtccccactcccttatctggcggagaggaagctgggggtaccctctaaccgagattcggctcctggggctacagtccatcgccctggggtgtgatggttatggaagtcagaagtgtcgctatttgccccgttttcccatgagaattagacatgtcagcatcaccccctccccttgctcctgagcatacctctgtgtcccctcccactaagccccagcccaggggtctccagccttggggagacagggccagattccctaggtcagtggatcagggctgggccagagggaggcgaggctgaaggagcaagggaggggctcagagggcttcccggaggaggcaaactgcgcgcaagttgtctcctttctaacctgggtgtcaaaagagaagatgccaggactcagctgccgggtcctgcggctctcaccttcctccctctccgttccctggttggactccagccccatcgccctccctcctcctgcaacaagctctttctctcaggatcctcgctgatccttgtagcctggacacccctttctcctctctcccgcgtggtcggctcacacgtcgcctcctccgccaagctctccgctctcctcgacacccctggggaatagtcccctccatcccatccccctatatatttccttttggccccaagcgccagcagagatcccccgcccgtgggcaccagggaggtgtcctgggacccccgcgatgggatagacggtgggggccgcgatgcacctgccccgcccgacccgcacgcctcgggtgccgcagcgcagctaccccgcccgctctccgcatctcccaccccccgcttcccaggctgcctcgctcgggtgacgtcagcgccccggtccccgccgcagccgctgcatcctccgtgcccggcctgagctggagtcccccgcgccccccgcgttccgcccggccatggctgcggtggcgctgatgccaccgccgctgctgctgctgctgctgttggcgtcgccgcccgccgcctccgcgccgtccgcccgcgatcccttcgccccccagctcggggacacgcagaactgccagctgcggtgccgcgaccgcgacctcggcccgcagccctcgcaggtgaggcgcgtgcggtgccaggtgccagcgggggacgcgggatctctccgaaggaggaggcgttgggatgggcttctcttggatgacagcaggagactttggtgggggtgtccgtggggaggtgggggtcgggaatggggagatctctccagtagttgacgggctggggttccctctgatgggggagtgcttggggatgcaggtccttgcgataaggggccgataccacctcccgggctccttccgcactctgctgggtaaggaccctctagcacccaacccccagctccctcaggcctgatggtccccccacctcattcctcctcctccacatcgtgttccctccccactcagagctaccagcccctactcataccaccactccccaggattcaagcctgatctgcgtgtgaccaaaaccccctcctctgagcctccccctcctcctccaggtctgagaatccttctccatgtctcccctcctccctggaacctagtggggggaaggctcatttctctccaccttcactgtccatttctcttctcaagctccctccccatctccctcctcagagctaagagcccccactaatatttgtagcctctcccaacttcatctccatctggctagatgtcgtggggagcggggaagcctttccctgcctctgctgaatgctccggtccccccaccctcctcctgcccctccccatggcctgagccccctgtcctcccctcccccaggcggggctggagggcgcctccgagtctccctatgacagagccgttctgatcagcgcttgcgagcgtggctgccgcctcttctccatctgccgatttgtggccagaagctccaagcccaatgccacccaaactgagtgtgaagcaggtgagggcccgccggcagggtgggccagcgtggggagaggtggcctgggaagggccgtccccagtcacccgctcccacctcccacagcctgcgtggaagcctatgtgaaggaggcagagcagcaggcctgtagccacggctgctggagccagcccgcggagcctgagccggagcagaaggtgggcctcccactgcggcctggggtcccttttcccaatacccccaccctcttcaccccgtgggaaatcttcattcacgtgcagaggctctgccagactctgcgttctataccaggcctgcagggcaacctccatccagccccgtcatgtctccagccttagttacatgcaacaacgccccccatgccccaccaccttttcaggaataagtggcagaaaacagccatcatttatcaaacatctgtcctggttcgggcctgacttcaacctgtcccaaatgtttttgtgtcacttggaggcacaaaggacaatgtcacccccatttagtgcccagggggcaacctcccaggtcatacacagggctgtgcaaggggcgagatttgaagccaccagagctgtggccactcctcacctcactcctcttaggcgcccccagagctgccaggtgctggtctaagcccttcccctgtgatgagctggtggtcactgtcacctggaggggctcagaactgcggctcagggtagagcaggcttgcctcgcaagcacgcacacactgccttatgggagaaataataacggttcatctattgtagtccaagcaatgctgcatcatggggaaactgaggcacagaaaatcatgtagcatagccagagacctaggggctgggactccccagaaagccctttccccacttcccccattttcctccaccccttcccagctttcactgctgttcagaaaagctcactgcactgtcagcccttccaattcagagctccctcttatttatttatttattttttgagatgaagtcttgctctgttgcctagcctggagtgcagtggtacaatcttggctcactgcagcctccgcctcccgggttcaagtggttctcctgcctcagcctcctttgtaggtgagattacaggcaccccccactacaatcggctaatttttgtatttttaggagagacagggtttcatcatgttggccaggctgatcttgaactcctgacctcaagtgatcttcccacgtcggcctcccaaagtgctgggattacaggcatgagccaccatggccggccatcagacctccgtcttgacgctgtcaaaataagaataatgaggatgatgatatttttagtaatagggactactacgcattaagtgcctgtgccgtgccaggcacctggcaggcatcctctagttgaaatttcatggctactccatgaaggaagagaacgatacccattttagggctcagagagcacaatccacttccctaagggtacacaggaagccaactgccacgctgagatctgtgttcactataagaagtcctattggcccaaatcacttagccacatccaatccaagtgaattctcctagctcctctcctgttagtttatttattcatttatttatttgagatggagtctcactctttcacccaggctagagttcagtggtgtgatcttggctcactgcaacctctgcctcctgggttcaagcaaatctcctgcctcagcctctggagtagctgagattccaggcgtgcgccatcatgcctggctaatttttgtatttttagtagagacagggtttcacgatgttgtccaggctggtctcaaacttctggcctcaagtgatcggcctgcctcagccttccaaagtgttgggattacaggcgtgagccaccacatcctgccccctcccattcattggttaatgccctatttcggtgccatctttgtgtcttggaccttttttcaccagagaaaggtcctggaggctccaagtggggccctctccctcttggacttgttttccaccctctgcaatgaccttgtcaactcagcccagggatttgtctcctccacctggacatactacttgcagactgacaatgggaaagtggtggtgtttcaggtgagacctctgacaggggccacgccagagtggcagatgggtgggcagggtaagaagatgggatgcattggctcttagctcatgagatgcaaagtccacagtgggcgagcttcaggcacagctggatccaggggctcagtgtctcactccatgccttgactctgctttcttttgtggtggcttcattcccaggcatttacttcttcttggcagtaaggtggatgccagaggctctaggttacaaacgctgtggtttttttttgttgttgttgttgttgttttgagatggactcccattcttgttgcccaagatggagtgcaatggcatgatcttagctcactgcaacctccacctcccaggttcaagtgattctcctgcttcagcctcctgagtagctgggattacaggcggccaccaccacacccacctaatttttgtatttttagtggagacggggtttcgccatgttggccaggctggtctcgaactcctgacctcaggtgtttcacctgcctcggcctcccaaagtgctgggattacaggcatgagccactgccccggctccctctggggttttaactgagctgggatttactctgattggccctggctggatcatatgaccatctctcaggcaattcactggcttggtctggatcatgttcctacttctggagctaaaggatggggttaaggcaaatggaggagcccatgaaagcagaaaacaacatccctgacatcaagcccacccctgatacccaggggaactgggtatcagctgggcgtgggacatggcagtcacagagggcctgcctgggcccaggggtgctgttctcacaagcctctctgtgctgtcttgttcctggcccagactcagcccatagtggagagcctcggcttccaggggggccgtctgcagcgcgtggaggtgacctggcgaggctcccaccctgaagccctggaggtgcacgtgggtaaggtgcaacctagaccagtgttccttccatgggtggccccactgccacaaggagtcggcctggcaaacagaccttctaggatcgggatctccatctctcaagtcctgggttccatggctcatcccccaggtctccatggtctatttcccagggttccatggtccacctcccagggttccatggtccacttctcagggttccgtggtctacttcccagggttccgtggtccatctccccgggttccatggtctatttaccagggatccgtggtccacctctcagggttccgtggcccacctcccgggttccgtggccacctcccagggttccgtgttccgcctcccagcgttctgtggtccacctcccagggatccatggttcactttccagggttctgtggcccatctccctgggttctgtggcccatctcccagggttccatggttcatctctcagagttccatgggttcatctcctagggtcatctcctagggtccatctccaagggttctttggtccatctctcagggttccatggttcatctcttaggattctgcagttcatctcccagggttctgtggcccatcccccagggttctgcagtccatctcccagggttccatggtccatttcccagggttccatgttccatctcccagggttccatgttccatctcccagggttccatgggttcatctcctaagggtcatctcctaggatccatctcccagggttccatgggttcatcttctagggtcatctcctagggtccatctcctagagttctttggtctatctctcagggttccatggttcatctcctaggattctgcagttcacccccagggttgcatggttcatctcctaggatccatctcccagggttccatggtccctgtctcagcattctgtggtccatctcccagggctctgatctccattccaggactctatgccccaggtcctgacctcctccctcctggtcatggttattgtggcctcttagcaaagacctggtggtcgctgagtggcagctgatctctcagaccctgtaggccccctggacaaggtgaggaaggccaagatccgagtcaagaccagcagcaaggccaaggtggagtctgaagagccacaggacaatgacttcctcagttgcatgtcccggtgggtggcaggaccttgggggtgggaggggggtgggactggaggtacgggtctccctggtcccggcctgggcagctgagtggtgcctgccgggcggggcaggcgctcgggtctgcctcgctggatcctggcctgctgcctcttcctctccgtgctggtgatgctgtggctgagctgctccaccctggtgaccgcgcctggccagcacctcaagttccaggtgggtgggatctgtgaatggcgctgggccgagggagggggtgaaggcagagagagctgtttgctggtcctggatttggccacctgctcccatggaggccaggacctcagacatttttttcttttttcatgtatatacatatatatacatatacgtgtgtgtgtgtgtgtgtgtgtgtgtgtatatatatatatataatatatatatatatattttttttgagatggagtcttgctctgtcacctgggctggagtgcaatggcaccatctcggctcactgcaacctccacctcctgggttcaagcaattctcctgcctcagcctccgaagtagctgggactatgggcgcgggccaccacacccagctaatttttgtatttttagtagagacggtgtttcaccatgttggccaggctggtcttgaactcctgacctcaggtgatccatccgcctctgcctcccaaagtgctgggattacaggcgtgacccaccgcgcccggcctatatatatatttttgagacaggatctcactctttcacccaggatggagtgcagtggcatgatcacagctcactgcagcctcggcctccctggctcaagcaatcctcctgcctcagcctcctgagtagctgggaccacagtcacgtgccaccatgccccgctaatttttgtattttttgtagagatggggactatgttgcccaggctggtcttgaactcctgggctcaagtgatccacctgccttgccctcccagaataccgggattacaggcatgagccacctcacccagccaggacctcacacttgctgcatgacttgggccagtttcttcactgccctttgaattggtgggaagaaaatccactcttagttggggcgacatgaagtcagaggtggccacacttctgtggtgttggcctcacctctatcatgcccaggtgtgttggtgacacctctgtggtgcccagagcctgggcaacatagtgaaaccttgtcactacaaatcatttaaaaattagctagatgtggctgggcatggtggcccatgcctgtaatcccagcactttgggaggccgaggtgggcggatcacgaggtcaagagattgagaccatcctggctaacaaggtgaaaccccatctctactaaaaatacaaaaaattagctgggcgtggtggcaggtgcctgtagtcccagctactcgggaggctgaggcaggagaatggcgtgaacccaggaggaggagcttgcagtgagccgagatcgcgccactgcactccagcctgggtgacagagcgagactccatctcaaaaaaaaaaaaaagaaaaaaaaaattagctagacgtggaggtgcatgtttatgatcccagctacttaggaagctgaggtgggaggatcacttgagcctgagagttcgaagctgcagtgagctgtgatggcaccactatactccagcctggacaacagagaagaccccatcacacacacacacacacacacacacacacacacacacacacacacacaaaagtccaggtgtggtggctcacacctgtaattccagcactttgggaggctgaggtgggcagatcacttcaggagttcgagaccagcctagccaacatagtgaaaccccatatctactaataatacaaaaattagctgggcgtggtggcgtgcacctgtagtcccagctacttgggaggctgagaaaggagaatcgcttgaacctaggaggcggaggttgcagtgagctgagatggcgccactgcactccagcctgggtgacagagagagactctctcaaaaaaagaaaaaaaataaaacaatcagaggtgggaaggagacagtcagggttgggggctcggcctctccccgtccctccacttccctcctcccctctcttcctgcagcctctgaccctggagcagcacaagggcttcatgatggagcccgattggcccctgtacccgccgccgtcccacgcctgtgaggacagcctaccaccctacaagctgaagctggacctgaccaagctgtaggcctccactggccccatcactgccaactgcagggggcccctcgggcctcacttgccctgagcccaggagtccaagggcagggtgggtccagccttgagcccctccacccccaaatccttcctctcctcccagtcccaccccttgccccacggagtcctggggacgcagtgccccagctgggaagagggcgggatcgggcactggttcctccttgtccccgctttcttgggggcttgctactttttgtcttctattgtgtggctttctgagtatttgaaccccagtcctgtgtcaccttcctttttccttctatgtcccctctctgcggggggggcgctgaggctgagggggagctgcgtcttgctagggcttcccccttctccccatcccggtctccagagacccagcttctgagagacagggtgtgggcatctccatgcccctataaagcgtgcctggggcttgtctggggctggggaggaataaaccatgtatataaaagagtttcaggctgagcctgcttctgttcggttgtctgtctgcccttggggtgtggcccacgcatggctatgacccctgccgagcaggatctttctgacatgggaaagccctggaaacccaggtggcaccaggcactgaaagtagctgcctctcagaaggacactccctctggtctaacccaggtcacactcccagctacagatgtccctggaaaactgactcgaggccaggcgcagcagctcatgcctgtaatcccagcactttaggagactgaggcaggagattcactggagcccagaagttccagaccggcctggggcaacatagcaaggccccatctctacaaaatacacacacacacacacacacacacacacacacacatatatatatataattaactgggtgtggtggcttgagcctgtggtcccagctactcgggaggctgaggtgggaggattgcttgaggcggggaggtggaggctgcagtgagctatgattgcaccactgaactccagcctgggtgacagagcatgactctgtctcaaaaaaaaaaaaaaaaaaaagtggcttgtgccacccatctgactggggcagttcagcgtcccttcctgtgcctgatgtccctgttatgaagggacaaattgcatcttgaagaggacttgattttgtagccacctggcttccggtctactttttctttttcttttttgagacagagtctcgctctgtcgcccaggctggagtgcagtggtgcggtctcagctcactgcaaactccgcctcccaggttccagtgattctcttgcctcagcctccaagtaggtgggattataggcgcgtgccaccatgcgcggctactttttgtattttcagtagagacgcagtttcaccatgttggccaggctggtcttgaactcctgaccttaaataatctgcccacctcagcctcccaaagtgctgggattacaggcatgagcctctgcacccagccagctttatttatttattttttaaaaaatgagataggctcggccgggcacagtggctcatgcctgtaatcctagcactttgggaggccgaggcgggcagatcacgaggtcaggagattgagaccattctgggtaacatggtgaaaccctgtctctactaaaaatacaaaaaaaaattagctgggcatggtggtgggcgcctgtagtcccagctactcaggaggctaaggcaggagaacggcgtgaacctgggaggcaaagcttgcagtgagcagagatcacgccactgccctgcagcctgggcgacagagcgagactctgtctcaaaaacaaaacaaaacaaaacaaaaaatgagacagggtcttacgctgtcaccgaggctggagtgcagtggtgtgatcacagctcactgcagcctccacctcccaggctcaagccatcctcccatctcagcctcttgactgcaggaagggagccacgcccttccgttcctgtctgttctgcagactcctccagattcttcttgtaactccgctttgagattcagttgacttgagttggtttctgttgctcgaaaccagagattcctgactgatacagggcctcatcccctgggcagagctcaggatcaggagcatgatggccccagcctacaggcaatggggtggagagtcccaggaattccaggctgatggagtgacagtgggtctgcaggttggggcagaaaattaaatgatgcctcctggggctgtgtgtaagactctccacccttcactctaccctggatcctggaaggttgatccacttggaccctcttctttccactggagtcagtcagagggaccactggcaggagatgagaggagggaggagtcaaggtctttcctggtgtccttcccagcatcccctgactcaagaccacaactcgaccaagcagcctcccctggagatcttcaagagctctggaggggcggggcgcagtgactcatgcctgtaatcccagtactttaggaggcagaggagggtggatcaactgaagtcaggggttcaagaccagcctggccaacgtggcgaaattcccgtctctacaaaaatacaaaaattagctaggcatggtggcgcactcctataatcccagctactcgggaggctgaggcaggagaatcacttgaaccctggaggcagaggttgcagtgagccaagactgcaccattgcactccagcctggacaacaagggcgaaactctgtctcaaaaaaaaaaaaaaaaaagaaaaaaaagggccccttggccgggtgtggtggctcatgcctgtaatcccaggactttggaagtctgaggcgggaggatcacttgagtgtaggagtttgagacaaatctggggaatatagcaagattcatctctacaagaaatttaaaaatttagccagacctggtggtgggcaccagtaatctcagctgctgagctgaagctgaggtggagggatcacttgagcccaggaagacaaggctgcagtgagccatgattgcactaatgcactccagcgtggctgagaagagtgagaccatttccaaaaaaataaatagataaatcaaaataaaaggctgggctcggtggctcatgcttgtaatcccagcaatttgggagggtgaggcggaaggattacttgatgccaggagcttgagaccagcctggccaacatggtgaaaccccgttcctactaaaaatacaaaaaattagctgggcgtggtggcccatgtctgtaatcccggatatttgggaggctaaggcatgagaatccttcaacctgggaggcggaggttggagtgagccgagatcatgctactacactgcagcctgggcgaaagagtgaggcactgtctcaaataatagcaataatagcccgggcacggtagctcccacctgtaatcccagcactttgggaagctgaggcgggtggattgcctgagctcaggagttcacaaccaacctgggcaacatggtgaaaccctgtctctactgaaatacaaaaaatttgccaggcgtggcagtgtgtgcctgtagacccagctacttactcaggaggctgaggcaggagaattgcttgaacccaggaggcaaaggttgcagtgagctgggatcatgcactgcactcctgcctgggagacagagcaagactctgtctcaaataaataaatacaataataataattgttcctttaggccaggcagggtggctcacatctgtaatcccagctcttcgataggcccaggtgggaggatcgcttgagcccaggagttcaatgttacagtgagttatgatcatgcctaggtgacagagtgggactgtggttcaaaaaatacatgtatagcccatttatgtatgtatgtatgtatgtatgtatgtatgtatgtatgtatgtatgtattttgagacggagtctcgctctgttgcccaggctggagtgcagtggtacgatcttggctcactgcaacctccatcccctcggttcaagtgattcttcgacctcagcctactgagtagctgggattacaggtgcataccaccacgcccggctaatttttgtatttttattagagccaggctttcaccatgttggccaggctggtcttgaactcctgacttcaggtaatccgttagcctcggcctcccaaccactttatttattaatctattttgagacagagtcccactttgtcgcttaggctggagtgcagtggcgagatctgggctcactgcaacgtctacctcccaggtttaagtgattctcctgcctcagcctcccaagtagctgggattacaggtgcaagccaccatacctggctaatttttgtatttttactagagacggggttttgccatgttggccaggccggtctcgaactcctgacctcaagtgatccgcctggtaccatgaccatcaggattcaacccagatgtaatatgggccccagggagtatcattctgggccctgtgtggggtttcaggaaaacctctaggaatgttgcccagaaataagacatgggcagaggtgagaagagaatgacagccagccgttctctttggtagaactttctttgatgatagaaacgttatgtctgcactactcccagccacctggaagttactgagcacttccaacatggctagtgtaactgacaaattgtgtttcttattttgtttagtttgagttgatgtacatgtaagatttttccggctgggcacggtggttcacagctataatcccagcactttgggaggctgaggcaggaggatcacttgagcccaagagttcaagaccagcctgggcaacatggtgaggcacctgtcttctttttttgagactgagtctcacactgtcgcccaggctggtgggcagtggcgcgatctcagctcacaccaaccttcgcttcccaggttcaagcgattctcttgcctcagccttccgagtagctgggagctgggattacagtcacttgccaccacgcccagctaatttttgtattgttttattagagatggggttccgccatgttgactaggctggtcttgaactcctgacatccggtgatctgcccacctcggcctcccaaagtgctgggattacagcgtgagccactgcacccagctgaggcacccgtctttatttaaaaaaaaaaaagaaattgaccagttgtgggggcatgtgcctctagtcccagctactaaggtggctgaggtgggaggattgcttgagactaggagtttgacactagctcgggcaacatagcaagaccctttctctaaaacaattttttaggccagatgcaggcaacaaagtgaagccctgtctctacaaaaaatatacgtatatacaaaattagccaggtattatggcggctgcctgtagtcccagctactcccagatacttggaaggttaaggaggaaggattgcttgagcctggggaggttgaggctgcagtgagctgtgactgcaccaccgcataccagcctgggtgacagagtaagatcctgtctctgacatgacatcatgcctggctaattttttaatttttttttgagacagagtctctctgttgcccaggctggagtgcagtggcacgatctcggctcactgcaacctctgcctcctggtgtcaagcaattcttctgtcccagcctcccgagtatctgggattacaccacgccaggctaatttttgtattttgttagtagacatgggattctgccatgttggctaggctggtcttgaactcctgaactcaggtgatccactagccttagcctcccaaagtgctgggattacaggcgtgagccaccatgtccagcctattttttgattttttatagagatgaggactcattatgtcgctcaggctggtcttgcactcctggacttaagtgatcttcctgcctcggtctcccaaagtgctgggattacaggcgtgagccaccatgcctggtcaaaatttgccattttcatgagttttgagtgcattaattgcatccacaatgttgtgcagccatacctgccatggattttttttaaattgttattgtttttgagacagagtcttgctctgttgcccaggctggagtgcagtggtgcaatcttggctcactgcaacctccgcctcccaggttccggtgattctcctgcctcagcctcccaggtagctgagattacagacatccaccaccacaccgggctaatttttgtatttttagtagacggggtttcaccctgttggccaagctgctgttgaactcctgacctctctcagccttccaaagtgctgggattacaggcatgagccactgcggccggccctgctgtggatttaaatggctactgtcactggtcagcccagtttgaaagggacttcatatggactcactctgtctccttgcctggcccccagtttctcttcttagtggctctagacatctgggctgcatcttgattcttaactgtcctcacctcacttcattccatcagcacagcttgtcccctaggcctccaaagcatacctccagcccacaagcatctctttgtctccatggcaaccaccgaagtccaagctgccactgcctctcactcagcaatggtgcccacctcctcctcttggggcttccggcctctccagttgccctctggttccatcttggataaagcaaatctgaccccagactccacacctttctggggtttactgttgtcttgaggagcccaaacattcccagacagcagagattcccacgatcgggtctcactaacactaacctaacatctccaagcgcttttttttttttctgagatggagtttcactctgtcgcccaggctagagtgcagtggcgtgatctccgctcactgcaagctctgcctcctgggttcacgccattctcctgcctcagcctcccgagtagctgggactacaggcgcccgccaccacgcccggctaatttttttttgtatttttagtagagacagggtttcactgtgttcaccaggatggtctcgatctcctgactttgtgatccacccacctcggcctcccaaagtgctgggattacaggtgtgagccactgcacccggccatcaccaagcgcttctgtgaggctctgcccctcactccctctgctctggcggctgcgtgaggttctctctggatttcttgagcctaccttgttccttccagccccagggcctttgcacatgcagtcccctctgccaggagcacactcctggtcctgcttcaccaagttctcagccacgtcagcatcccctgggatccccatgtttcacttcctgtccatcttccctgctctgatgacattcgtcgttgattaaaaattatttgttggctgagggcagtggcacatgcctgtaattccagcactttaggaggctgaggtgggcagatcacctgaggtcaggagttagagactagcctggccaacatggtgaaaccctgtctctactaaaaatacaaaaattagccaggcatggtggcacgtgcctgtagtctcagctactcgggaggctgaggcaggagaatctcttgaacccggtaggcagaggttgcagtgagccgagatcatgccactgcagtccagcctgggcaacagagcaagactctgtcttaaaataaatacataaataaaaataaaaataatggaggccaggcatggtggctcacacctatagtcccagctctctgggaggctgaggcaggtggatggcttgaggtcaggagttcgagaccagcctggccaacatgacgaaatcctgtctctactaaaaatacaaaaattacctgcgtgtggtggctcaggcctgtaatcccagctactcaggaggttgaggggggataacctaattctcctgctcacctatgaagagcttttgatctttgccagcctggcagccacctctcctgtgccatccctcctgccttttggtcttggagaccaaaatgcgcttgtcctcattttgaatcaatggtctggccttggggccttttctgcagcttccctttgctttgcaatgctgttacggacttggtaggcatctacccagcacctgcagtcttccttcttccttcgttttatttgtttgatttttgttgtttcatctgtcgtccaggctggagtgcagtggcgcaatcttggctcaccacaacctccgcctgtcggattcaagtgattcttctgcctcagcctcccaagtagctggaattacaggtgtccaccaccacgcccggctaattttttgtatttttagtagagacaaggtttcaccatgttggccaggctagtcttaaactcctgacttcatgatctatccacctcagcctcccaaagtgctgggattacaggcgtgagccactgtgctcagcctatttacttctttatgggttcatcttctgcctcctacatcactcaagactgggctcactgggagggcagggctgcatcggctgtgaccccagtacccatcaacgcaggtcacagaggaatgacccaacaagggtgtctgggatggctgggaaagaaccccgcttgccatgcagaggccttggggctgctctgcccagtaaccaaccccttaccctatcctgactctcaggagagaaaggcctctttgaccacgtagctgaagaccagactcaccacagctctgtctctgagcttcaatttcctcttctgtcctagagccctgcccctccctccattttcatcctgagctgcacacagacctggtagtgggtgggtgggtggctggcgtcatggcaacggtagcacagggttgccacagcaacttggttccctagtgacaggcctgagtttcttagcccaggggtggcaatccgccaggaagaaatggggagagggtgtccccagcatccagctggcacacaggggacattctgtaaacacttggagggcaggatggggatgcatggtggctgtcttttcctggggtgcgaagaggagacttcaggtccctgttgggctccatgcagctcctggcacactctccctcctcagggcccccatgcaggctgttccctccgcctggaggctgttccctcttcgctccgtctggccagctcttcagcctgacctcctggctcagccccagcttttatcatggtgacaattaagtgatggcttgtttgcttgtgtgatgattggtttaataaatgttccctctgccagatgctatgcgctaggcgtctcggtcacagctgtgtcccacacaccaaggaggctgctctcaatacatctttgtcgacactctccatccttgctccgccttgcccacttcttccaagccagtgcggcctcatctctatcccttgagctttttctggcactgggcttaggtccttcatattatgtcctctcagaatatacgggaacattgcacaatgttctggaatgtcctggaacattctagaacattctgtccccttcttttactgaagctgggacatcatcacctcttcagggaggctctccctgatcttctggctgaagcagtgctcccctacccaacacacacttgatcgctctcagctcattgccttcaaggcagttattgccatctgaaatggccttggtcattgatcaattatatatctcagatttgtctttcccatcagaatgtacctttcagaatatcttggaacatgaggtcaaggatcttgtcggatgggctgacagttgaatccccagcagcctctcagcaccctagtccccacagtggtgggtcccagttggtcgccccccagaggtagtcctagttcttatcacattgggtggatttgaccttttctttttttttctattgggatgggatccctctatgttgccacggctggtcttaaactcctggactcaagtgatcctcctgcctcggcctcccaaagtgctgggattacagtcttgagccaccgcaactggcctgattttgttttagtaaatcagctttttttttttttttttttttttgaggcagagtctcactctgtcacccaggctggagtgcaatggcttggctcactgcaagctccgcctcctgggttcacaccattctcctgcctcagcctcccaagtagctgggactacaggtgcccgccactacacccggctaattttttgtatttttagtagagacggggtttcaccgtgttagtcaggatggtctcgatctcctgaccttgtgatccacacaccttggcctcccaaagtgctgggattacaggcgtgagccaccgcgcccagccttagtaaaccagctttaataagacataatttacatccaatggcacatccatgttaaatgcccagttcaatgagttttggcaaatgtaatcctcctaagatacccctataatcaagatatacactaggtatggtggctcacacctgtgatcccagcactttgggaggctgaagtgggagaatcacttgaggcctggagttcaagaccagcctgaacaatatagtgagactctgtctctaccaaattttttttacaaaattagccaggtgtactggcatacacctgtggtcccagctactctggaggctgaggtacgaggctcatttgacccaggaggttgaggctgcagtgagctatgattgcgccactgcatttcagcctgggcgacagagtgagaccttatctctaaaaatataaataaataaataaaagggcccggcgtggtggctcatgcttgtaatcccagcactttaggaggctgaggtggacagattgcttgagctcagaagctcaagaccagcctgggcaacatggtgaaacctcaactctacaaaaaaaaaaaaatgcaaaaattagctgggcgtggtggcgcacacctgtggtctcagctactcgggagactgaggtaggaggatcacttgagcccaggaagtcaaggctgcagtgaactgaggttgcaccactgcactctgggtgacagagtgagaccctgtctcaaaaaaataaataaataaaaataaaataataaaattagaaaggcatggtggcatatgccttatagttctagctactcaggaagctgaggagggagcatggcttgagcccaggaattggaggttacagtcagctatgatcgtgccactgcactccagcctaggtgacagagcgagacgaagaccctgtctttcttttttttgagccagagttttgctcttgttgcccaagctggagtgcaatggcatgatctcggctcactgaaacctccgactcctgggttcaagccattctcctgcctcagcctcccgagtagctgggattacaggcatgtgccaccacgcccggctaattttgtatatttatttatttattttatttttatttttatttttattttttttgagacagagtctcgctctgtcacccaggctggagtgcagtggtgcgatctgggctcgctgcaagctccgcctcccgggttcacgccattcttctgcctcagcctcccaagtagctgggactatgggctcccaccaccacgcctggctaattttttttgtattttttagtagagacggggtttcaccatgttagccacgatggtctcgatctcctgacctcgtgatctgcccgcctcggcctctcaaagtgctgggattacaggcgtgagccaccacgcccggccaattttgtatttttattagagatgaggtttctccatgttggtcaggctggtctcaaactcccgacctcaggtgatccgcccgccttggcctcccaaagtgctgggattacaggcgtaagccaccgcacctggccaagaccctgtcttttaagaaaatggataaataaaacataaaaaaagaaggtagccagtcgaggtggctcgtgcctgtaatcccagtactttgggaggccgaagtgggcggatcacctgaggttgggagtttgagaccagcctggccaacatgatgaaatgctgtctctgctaaaaatacaaaaatcagccaggcctggtggtgggcaactgtaattccagagacttgggagggtgaggcaggagaatcgcttgaacccgggaggtggaggttgcagtgatatgagatcgcgccactgcactccagcctgggcgacagagtgagactctgtctcaaaaaaacaaaacaaaacaaaaacaacaacaaaaatttaaataaataaataaaacataaaaaaagaaggtggggccagtgcagacatgacttcaaggaggtgcgggaggctgctggctggggtaacagagagagatcatggtgtttgtcagcaagcctcactcatgatcctgaaaggatgtgccgcctccattaaaaaaaaatttagggccaggcgcagtggctcacgcctgtaatcccaacactttgggaggctgaggtgggtgaatcgtctgagtcaggaatccaagaccagcctggccaacatggtgaaaccctgtctctactaaaaatacaaaaattagccaggcgtggtagtgcatgcctgtaatcccggctacttgggaggctgaggcaggagaattgcttgaacctcggaggcggaggttgcggtgagccaagattgtgccattacactccagcctggtgacagagcgagactctgtctcaaaaaaaaaaaaaaaaggtaaaacacagagtttgttagataggagaaaaatcaaacaggactgaggacagggagttgatgtcgggggaccttgggcttgccccaggaccactccgtggtgactgcctgatggggcagacactgtccccagcctaaaaccacaggaacttgaagccctcccccaaggcttcactttcctcctccataacacctggggattgtaagggaggcctccaagctctgacctgagggtgtgagccctgcagctggtctgaagtgggagagcaggtggcgcgggccctgcctctaggagagccgtgccagctgtgggccagatggtggccaggcccgtggatgctgcctgctatgtccctgcctgccggctctgctagaccacaggtcatcattactggatgaggcgtgtgcagtcaccggcgtgggccctccaggtcctccacttgtctctgctccatgccagtgatagtggcctctagagctcaggccaacagctctggcagaggtcactggcctcactctgcctcactcgacatcccatctgttccatctctttttggtcccacctgcaaagtgcatctcaactaggactacctcccacccctccatgtctgtcaccctgggatgagccctacccatttttccctggattatatgcctcctgactcatgtcccaaattcaagatattgtcccccagttgtcagacactgttgaacagtcagacactgtaacactgttaaattgacactgttaaaaccaatgtcagctgggtgcagtggttcacgctataatcctggcactttgggaggctgaggcgggcagatcacttgaggtcaggagttcgagaccagcctggccaacatggtgaaaccccgtctctaataaaaatacaaaaattatgctgggcacagtggttcactcctgtaatcccagcactttgggaggccaaggcaggtggatcacttgaggtcaggagtttgagaccagcctgtccaacatggtgaaaccatctcaactaaaaatacaaaaattggctgggcgtggtggcacatgcctgtagtcccagctactcgggaggctgaggcaggagaatcacttgaacctgggaggcgaagattgcagtgagctgagattgtgccacggcactccagcctgggtgacagagtgagactccatctcaaaaaaaaaaaaaaaattagccaggcatgtggtacatgcctgtagtcccagctactcaggaggctgaggcaggagaatggcttgaacccaggaggcggaggttgcagtgagctgagatcgcaccactgcactccagggtgggccacagagcaagactccgtctcaaaaacaaaacaaaacaaaacaaaacaaaaacccagtgtcaattacattgccactgcttacaagccccctctcccttctcatttcatgcagaggaccccaaaaatgatccccaaagccctctgtgacctgaagcacctcctgttgcctcccacccattctcctcccctctcctctccctcttcctaatttttctctgccaggccactctctaggcacgctcctgccccagggacattgcactggctgccctgtgctatgtgatcgtggaggacagatcacacagtgtgtccaaagtgcagtgagtctacagcacactatgtgtgtgtgcacagccaggagcccagagaacctcttctttcttatcttcagctgtgtgtcttgtgtgtctgacatatgggtcaaatctggatgtttatgaagtgtgcgtgcatatggacaccattgatttcaaatgttatttgtggcgggtgtgtcagctgtaggtcgctgctgagtgaggtttgatgcctgcatgtggttcgtctggaacaaagactcctggggcggtgctgacttagggcaggcaagggtgtgtgtgtgtgtgtgcagagcttgccggaacgtgagctgttcatgcacgcgtgcattcaacatttgcagagtgcttactgtgtattggagatgccagcagttcccttcagcacttggtatctgtcagcttgcacagggtcatctgagagcattttgtgtaacgattgagcacgtattgttgtatcaggccctctgttggagatgctggttgagtgcggtccaacctgcaggagtccactcaagcaggccccttccttcctcctatggggtctccagccccatagccacctccttcttccagcactgacgggaaagaaggctttgagctccttctggatcactgctttctgcccaagactgcacaagtcagagttttctgacttggaggttaaaagaataaatgagctccaagctacagaggggatcctgggagcctggagcttaccagagatggggggtgaggggtgcccccaaaaggtctagatgcttcatagacgcctatagatgcaggactttgagccctggctgagggtcagtgtgttgggagggctggtgcttggggatctgagggtgttgggtccggtggaatggactttgggagtgtaaggtttgaaggatctgtgggcagggatttgggggagtgggagatgagttttgagtagagaatgggagataattggatgtgcagggttttagagtatgagaaaccagaattggtgtatgaagcaggtggtgggaacctaaggccagatgattggggtctcagggtggaggctctgaagagggtatgtcaggggagggtggggaaccatgaggggctggaagtctgaggcctgggcatgggtgagtttcgcccctgagagaggcctgggaaggaggtaagactggagtcggggtgtgcagggtggggagagggagggtgtggttctcagagcttagagacccatttctccatgctccatctcaccctccctcccaccctacctataactcacttccctgtggctccaacgcctcaaagtataaccacgcccagccaacgcccggggcacgcctgccagcgccccagggcactcacagacactccttaacacctgcacgtgccccgcccctcctcagatccgccgctcacttagcccggccccacccccatcagatgaggctccgcccccccggccccgccaatccctcgccccctccacgcacacacccctgatcttccccgccctccttccaaccagactccacccctcgcccaggccccgcccttcctcagaccaggccctctcttcgcttgaccacatccatccccagattcctcctctctcctgcccagacccgcccaacctcagacccatcttctcctttctacctccccgaccactcccccaccgcattcctaacctccaccttgtcccttctcacacctggccccgccctttatcctgcgccccgcctcctccgcaggccggacccttgtccctcctcctcttgccctgggcctgccccttcttcagaccccgccccactcctcagcccagggaccaaccccatcctgcgcctacttgtcctgcttcgccccgtccccacctatccacagacaatacgccctctcagcccagaaccgcttccctttcagacttggttccgcccctcacgccagggtcccgccccaatccggcacccctagcccaggccccgccctggacccacctctctgcatagcaggcccctccctttatcccagacccgccccggccctccgtagaccacgcccctccgattccgggcccgccccaatccttggtttctggtcccggccccgcccctccgcagacctggccccgccccgccccccgcgtctcggtttcccgggcctgcgcgcgcggctcccgtcactcgaacgcgcgacggcggggggaagatggcggagtccggcggtagcagcggtggtgctggtggcggcggcgctttcggcgcgggcccgggccccgagcgcccgaacaggtgagacccggcccgcaggatagacctgcacctgtcttggagcccaggaaacctgtgggcagtcttgggcgtcctgaggggttgaggggaggcctggcacggctcgagggtctttcgctgagaatttggactttacggggccgtggggtactggaggagccgagggctactgagggggtggctggaggggggctgggtgccccaggacctcgaggcgtctgcaggcggccctagggacctgagaatcctgggggtctgaagggaaaccgaggggctcttgactgtggtgggccgtggggcaactggggatgccaaagggcctgggcagcagagagggcctgagcaggggccatgccatggccagtctgagggtggtgaggtgtcttgggggctctgaggaaggggctaaggcccaaggcatcctgggaggtgctgaagggccccaaggtggctaaaggtggtcctgagagcgtgctgaggggcgctggaaggagtagagactgtgggaggctctgggtgggggacttaggtgaatctgggagtctgagatggggaggctgagggggcctggggtgggtctagggaacctgaggggggtgagagaactccagggggtttataaagaacatacagagggttcttctttggggctcctcccttccatccccatggggtccaaatccacatccccaacaggctaaaggacttacagaaaggtcttgccctcagacaaggggacagaattcacccctttggtcagagggaggccccctttccccatggcccagtcctgacatggattgcttgaacgtccaggtttgcatgacaattagttatcatcaataactaatgatatgtgtgtgcatgcattgtattggattgtcagagggaaagaacacctgccttaggagtgtgatctcctgctcttttcctattgggcaaagccagaccctcccaccccagctcctcctctagcccagcacccaggtcaggccaaggaggaaattcaggctttttcttgctggtgagcttccaggagccagtaatttcaggcaacatgataaatgatgaagttgtttgatacttacgtgctgtggagttttggacctgtgggctgattgttggagggaatggcctgatggcctggctgtgtgatttggtactgaatggaacacgcatgggatgggtggggaagggaggagggatggctgggccagggcacagaggaggcaaaggccctgcctgttcctgaggatgctgagtggcaccttgagacttaggtctgtgggcattgaatctggtctgccagaggggccatggggaacccaggaggtgtgtgtccagaggggtgaccagcctcctggggtaggtgtggggcaagattgtcctgcagtagggagccaggagatgtcagaggattttcagagatattcagggagtggccagggcttgaaaattgggtatcagttggcaagtaagggacagggaagagggacagtgaaccccaggtccctgccttgggcactggagtgggataacctggggctagggctttttttatttttatttttttgaaaccccgtctcgctctgtcacccaggtatctaggctggagtgcagtgacgccaccaaggctcaccgcagcctcaaactcctggactcaagtgatcctcccacctcagcctcctgagtagctgggactacaggtgtgcaccaccacacttggctaatttttaaattttttgtaaagaccaggtcttgctctgttgccaggctggtctcaaactcttgggctcaagcaatcttcttgcctcacccctcactaagtgctgagattacagatgtgagccaccatgctgggcatggctctttttttataaacagctttatcaagatataattaattgcatggcatacaattcactcattttgtttttatttatttatttattttttgagacagaatcttgctctgtcacccaggctggagtgcagtggcgcaatctcggctcactgcaacctctgccttccaggttcaagggattttcctgcctcagcctcctgagtagctgggactacaggtgcccgccaccatgcctggctaatttttgtattttttaagtagagacagggtttcactgttggccaggcaggtctggcattcctgagctcaggtgatccacccgcctcggcctcccaaagtgctgggattacaggcgtgaactactgcacccagccaattcactcattttaatttatcattaagttttttttttttttttttttttttttgagatagagttactctgttgcccaggctggagtgcagtagtgtgatctcggctcactgcaacctttgcctcctgggttcaagcaattctcctgcctcagcctcccgagtagctgagaccacaggtgcatgctaccatgcccagctaatttttgtatttttagtagagacggggttttgccatgttggccagggtgatcttgaactgctgacctcaagtgatctgcccgcttcagcctcccaaagtgctgggattacaggtgtgaaccactgtgctcaacccaggtcattaagtttcagtacatttactgagttgtgcatccttcaccacaatccagttttttggaatgcttccatcaccccaaagagttcccccaagctcgtctgcaattaaccctgctccaccaacatacagccccggggacatcctgatctgctttcactctctgtagctttgccttttctagaaatttcgtaagaatggaatcagacatgtggcctttacgtctggtttctttccttaacataatgtttttgaagttcatctgtgttgttgtatcagaaatttgttctttttcactgtggagtgaaaataaacaaactgtgtccgtccatacaatctcgtatggacggacacagtttgtttatccattaactggttgatggactgttgggttgtttccattttgacaactgcaaataaagttgctgtgaacatctggatatgtgtctctgtgtggacgtatattttcatcctcttgggtaaatacttaagagtagaatgactagttcatatggtagatgtgtttaaatttctttttttttgagacagggtctcactctgttgcccaggctgaagtgcagtggtgcaatcacggcttactgtagcctctacctccttgggctcaggtgatcctcccacctcagccttccaagtagctggtaggtactacaagggcgtatgccaccacacccagctattttttctgtgcttttgttgagacaaagtcttgccatgttgcccaggctggtcttgaattccagggctcaagcaatcttcccacctctgcctcccaaagtgctgggattacaggtgtgagccactacgcctggctatgttttaatttttttttttttttttttttttttgagatggagtctctctctgttgcccagcagttgttcactgcaacctctgtctcctgggttcaagtgattctcctgcttcagcctcctgagtagctgggattgtaaggatgcgccaccacactcagctaatttttgtatttttagtagagacggggttttgccatgttggccagactggtcttgaactcctgacctcaggggatccgcctgcttcggcctcccaaagtgctgggattacaggtgtgagccactgagactggccatgttttaatttttaggaaactgccaagcttgttcccaaagtggctgtaccattttgcatccccaccagcaatgttcaagagttccagctcctcctcatcctcactaacacctggtatggccagtccttagttttagccattcttataggtgtgtgctggtgtcttcatttggtgtttttatttatttatttatttgtgagatgaggtctcactctgtcgcccaggctggagtgcgatggtgcgatcctagctcactgcaccctggaactcctgggttcaagcaatcttcgggcctcagcctctggaataagtgggattacaggtgtgcacaccactgttcccagtcttattttggttttaatttgcatttctctaataactaatgatgttggacagtttttcatgagcttcttagctattcatctctttggtaacgtgtcttttcaaatgtttgggccatttttaagttgggttgccttttttttttttttttttttaagactgagtctcgctttgttgcccaggctggagtgcagtggtgcgatcctagctcattgtaacctccacctcttgggttcaagcgattttcatgtctcagcctcccgagtagctgggattacaggtgcatgctaccacacccggctaatttttgtatttttagtggagacggggtttcaccatgttggctagactggtctcaaactcctgacctcaggtgatctgcctgcctcaggctcccaaagtgctgggattagaggcatgagccaccacacccggctctttttcttttttcttttttttttttttgagatggaggcttgctctgttgcccaggctagagtgcagtggcgtgatcttggctcactgcaacctctgcctcccaggttcaagcaattctcctgccccagcctcccgagtagctgggattacaggcgtgtgccaccacacccggctaatttttgtatttttagtagagacggggtttctccatgttggtcaggctggtctcgatctcttgaccttgtgatctgcccgcctcagcctcccaaagtgctgggattacggcgtgagccaccatgcccggccctctttcttaaaagacatctttgtcattctcccctatcctccatcctagtgaaaaatcactgtttggagcaactgataggggcatctcatgcctcaggtgctagtgtggggagaacccctaatgtggcaagatggagcatgcagaaaatggatcatattttgagggagattggtacaagacattctcccaaaagtcattttgagacattgagtctttgtagcattgttcgtctgttccttcatttattgcaaatgggacagccaggcctggagcacgacccacctcctcgcctcaacctgcccacgtctccttcctcttcatccttccactctccaaggttctggcccctcagagccacctgcctgaccatgcaagctcaagtagtccccaggacacttttgctagtcacctagtgtgtgtgtgtgtgtgtgtgtgtgtgtgtgtgtgtgtgtgtgtttgagatggagtttcgcttttgttgcccaggctggagtgcagtggcatggtcactgcaacctccacctcccgggctcaagcaactgattctcttacctcagcctcccgagtagctgggattacgggcgcctgccaccaagcctggctaattttgtatttttagtagaggtggggtttctccatgttggccaggctggtctggaactcctgacctcaggtgatctgcctgcctgggcctcccaaagtgctgggattacaggcgtgagccactgcgcccggcttgtggttttttgtttgtttgtttggtttggtttgaggaagagtctcactctgtcgcccatgctggcatgcagtgtcgtagctacctgcagccttcttgacctcctgggctcaagctatccttctgcttcagcctcccgagtagctgggactacaggcatctactaacacacctaatttttttttttttgagacattgtctcattctgtcgcccaggctagagtgcagtggcacaatctggactcactgcaacctccacctcctgggtttaagcgattctcctgcctcagcctcctgagtagctgggattaccagtgcacgccaccacgcccaaataatttttgtatttttaatagagacggggtttcaccatgttggccagggtggtcttgatctcctgacctcgtgatccacctgccttggcctcccaaagtgttgggattacaggcgtgagccactgtgcctagcccacacctgactaatttttaaaaattgttttgggccgggcgcggtggctcatgcctgtaatcctaggactttgggaggccgaggtgggcagatcacttgaggtcaggagtttgagaccagcctagccaacatggtgaaaccgcttctctactaaaaatacaaaaattagccaggattggtggcacgtgcctgtaatcccagctactcgggaggctgaggcaagagaatcacttgaacccgggaggcagaggttgcagtgagctgagatcgctccactgcgctcccacctgggcgagagaaccagactgtcttaaaaaatatatatattattttatagagatggggtcttattattatttttttttgagatagagttttgctcttgttgtccaggctatagtgcaatggcatgatctcggttcaccaaaacatccgcctcctgggttcaagcgattctcctgcctcagcctcccgagtagctgagattacagacatgtgccaccatgcctggctaattttgtatttttagtagagatgcggtttctccatcttggtcaggctggtctcgaactcctgacctcaggttatccgcccaccttggcctcctaaagtgctgcgattacaggcatgagccactgtgtccggccaagatggggtctgattatgttgcccaggctggtcttgaactcctgggctcaagtgatcttcctgccatagcctcccgaagtgctgggattacaagcatgaaccactatgcccaacctgtatttttgttttttgtttttgaggtactatatatgtaacacaaaattcacccactttaagtgaacaattcagtggcatttagtacattcacagaattgtgcaaccatcactgctgtccagttccaaaacatctttgtccccgcaaaaggtgaccccatcttcattagcactaaccccctattctccattgcccagcccctgacaatcaccaatctgcagtctgtctctatccgttttcaagttttataggtagaatcatgcactatgtggccttttgagtctggcttctttcactcagcatgatgctttgggggtcatgcatgttgtagcctaaatcagcacttcattcctttttatggctgagtaatattccactgtgtggatgcaccacatcatccattcatctgttgatggacacttagattggttccaccttttggctattatgaatcatgctgctatgaacatgagtgtacacatttttgtctaaacactcatgttcagtcctttggggtacacatctaggagcagaattgctggggcgcatgcttgttgtatattcttgatcatgctggtcaccacctaacgttatttgttgtgtttctctggtgccttgaggttggaaagcctgtctctcttgtgccctcttgtgtgcctggaacatgaatgacacagaaggaggaagtgtcccagagacgtggctgagagggaggaagggagggatgggggtgtgcaaaagcttattgctctctgaggcttgcagtctggcaggtaggaattcccttctatgggatcaggtcgatcttttgcctttccagtgaggcttgtggggctgctggggggcagtgggggctggccttagtctctagctgcctttctagcctgccaggcaacgcccgcatctgcctttttgtcccacgaaggttttgtcttttggccaggggcgggggcagttcctgtcttccccctggcccttccagcggtaccacaactcaagaaactgtccccaggagggactgcgctcccccacccccgaccgcccccaacgttatataacttgtttgttccaacttctgtcttctgcaaccgagggggaaaaaagaaagagaaaagcttattctccttccttcctatctcgagggatcaacaaaaaacccgttgcctagtagaggtggtcattaatgactgagccgaacctcagggatggacagagtggggctgccctggctggggtgtgcggagaggaggtggggtccttgctgcaagcacaaaggacacttgttcaccagctggcctcctcccagctcgggccgcggggtctagactccttggagggaaaggaggcttgggccacttggggtgtcgcaaggggaggcaaaccctctggggagtcgcacctccccagctaaaattctgtcactgtgaggtacctgaccggcagagttttggaggaaccttctggccttgcagcctctccgacatgggcctttggcatccacgctttttggcccacgctccctggagacgcctgggtagggcccaggctcactgagtcatgctgttcctgggggtgaggtggggggatctgggtgagggatgtgccagcttcaggcatttgcataagaagtggtggctaggctgggtgctttggctcactcctgtaatcccagcactttgggagcccaaggcaggcagattacaaggtccagagtttgagaccagcctggccaacatagtgaaaccccctctctactaaaaatacaaaaattagtcaggtgtggtggtgggcgtctttaatcccagcaactctggaggttgaggcaggagaatcgcttgaacctgggaggaggaggttgcaatgagccgagatcctgccactgcactccagcctgagcgacagagtgagactctgtatcaaaaaaaaaaaaaaaagaagtgatggctgggacgttgtgcccaggggctttgctgcctgctgaaagtgtttgcatggaaagttgtggccgagacgctgcgcccggtgggtttgtcacagtcagtctggctgggtggcctttgcctgttgaagctttctccacaatctagatcatctccaccaagcccagaggccttggaagggtccagccccccagctcctgctaggaagacttaggggaagaggtggcttcccaaggaggttcttgctactttggggaagttctcattcctttggcctcttgcccctttcttttttattattattaattttttttgacgtcactctgagctcaggctggagtgcagtggcatgattttggctcactgcaacctccgccttctgggttcaagtgattctcctgcctcagcctcccaagtagctgggactacaggcgcccactaccatgcctggctagtttttgtatttttaggagagatggggtttcatcatgttggccaggctggtctcgaactcctgacctcaggtgatccacctgccttggcctcccaaagtgctgggattacaggcatgagccagtgcgcccggcctcatgcccctttcagaaggaggattttgacccttccaagacgtggactcaagtccttctcctggaaaatgtggtcagatatggcggcatgaggtgtctcatcatacccatgggtgactgtggctccctctttatgggttgtggctgtgacagattcctcatctgggaaatggggctccaggcccaccaggtggggggtgtctgggaggaaacgagtggggagaggtcacatgtacctcatcagtgttactgtggcagtgctgacgcccatgatggggacactgccatccttctgcccgccatgcccgcatgggccttgaggggatcgtcaatgccagcaagccttgatgtggcgtgcgtgtgtcaggcagggaaaggagagggtgaacttgagccattgggaagacagtagtgccatgacttgggccgtaagagggacagcagcaggggcagcgagagagtagagcacgtccagcgtgagctggagagggcaggttccgccaggagtaggcctgggagcaggagctcggcagggcgggggcaggggcggcggggggtggcgcgtctcagcagggatgggggcaggtggaactgggccagcccaagaagggcactggcccacaggccgagccacatccaggccactcgatctgcccctcacagctgagccccttctctgggaaggaggccaccctctcctcccctccttgtcggcaggtcccaagagctctgggagtggaattgctctgaaagcactcacttcaacctgaatcgtgcagtgcgatcgtcacagctggactgtttccacctggtagctgtgacccccgggacggcctccttgtcgttgtccgtagttaccggggaagaaaggctttattaccctccgccataatcgcaccatctccagggagcccctgcgaatgtcatcccacctcccccacggcgattactttttatctcacccacctctcctcagacactgtaaaagggaggctttctcctcactccagccctttggttttttcctttttctgatatttgtgtgtgtgtgtgtgtcttaccctttggttttagggaatgttttagatttggtgttaagaggccctggaggaggaagagaggaggaggaggaagagtggaggaagaggaggaggagatgagagggaggaggaggaagaggaggaggagaaaaagaggaggaagaggaggaggaagagaggaggaggaggaaagagagaggaggagaaaaagaacaggagaatggggagggagagaggaggatgagggggaaggacacagatagaaataattcagcgacttggggccttggatcctggaagaagggggtgggatctactgaaggcaaggggtgactgggcagcatgtgtcccggcatccccagctctttgctctgtggacaggatttgttagacacatttctctgcctttgtgcaggtgccacagtctcctgtgtccaccccatgcctggtgctggacatgaagggtccatgggacagatggaccctgcccatggggcgcatacatgccagcaggagttagagaacgtcgtgcggtcatttccgggctggctgggccagggggccagggcagggtttgggtgagcggcatatcagtcagcctcctgttttgaaaggatccctctgtaggccgggtgtggtggctcacacctgtattcccagcacattgggaggccaaggcgggtagatcacttgaggtcaggagttcgagaccagcctgggcaacatagtgagatccagtctctactaaaaatacacaaaactagctgggcgcagtggcgggtgcttgtagtcccagctgctctggaggctgaggcacgagagtcgattgaacccaggagccgagattgcaccactgcactccagcctgggcgacaaagtgagactctgtctcaaaaaagaaaggatccctctggcaagagacaagggaccctcggccaaggtgggccctggagggatggagaggcacacgcaggcttggggatgcctggaggttgagcttgtgctgactgatagtggtggccagtttctgccctccccaccgggcaggctgaaggtcagggttgtccttggtcccgcgcggctgcactgcctgcaacaagcagcagacttggaggcgccacctggcctaggggattcgcagcccttcctgtgttccagaaaagcccttcatgcctctccttgctcagggttcgtgccacttggagctcccacagtccttgagggcttcaggtcttcccaccagcaggtcccagtcctgggaatgtccctcctcctgagagaaggcctcagtctggctgcagctgcccaggaggtcctcaggtagcatctcttgtgggttccaccttcgagccacagcctggagccagctcctcctgctctctcctccccatcccagctcagagccactcctggctcttccccttctgggcatcatccccaactccagccagcgggaccctcctaaggcaggaatcagaccacctcactcccctgccggccacctgccagtggctccctcactctcagaacaaaatctacttcttgatgtgacccgctgggcccctgagcttccgcagctctgacggctctgctgggctctgaagcacgctcactggaatgtcctgtcccagtgatttgcacggctcaagtgttgtctcctcggggcctggccactgtgtccaccgtggcgccactgctcgccctgtcgtcatggtacattctctgcttgaggacccatgtccctgtagaatgtacgttccccaagggcagggctttatcagatctttttacagtggtggtcctggcgctggcacagctactggcacgggatggatgcttttgagtgtagatccagtgagtaccccaccccgaacagtcttcgatgcataccagaggggaagcctcctggcatagctctgcatgcccaggctggccgagggtcatccgcctcttcctcttcacttcattgaaccagcagggtgtgggcggagaagcagaaattcacaggcatgttgtcagtaaaccagccctgttacctgttacagagcccagggcaccataccgttttgcgtgtgctgtctttagtgagtgagcaaaacctcagccctgcatgttaaagcaaaggcggcaaacgacagccgctctctccctgtccagctgtctgaagtggaagtgggggccaagcccgctgggttcccgctgccggcagccccgccctcctcctctggtagccgctctgcagctgtgcggaccagctctcttaacacttgttaaccccagcctccagtcccttcctgccccccaccccgccccttccacatgtctctccggagagggccgcacagaattcacaggactcgtctccaacggctgcgccagcaattccctagcattcctcctctgcagagtggattttggtgcatgtccagcgtgatttcagacccctcactgcgcagcggagtgcctgatcgctctgtgtgcaccaccacggtgcacactgaaaatattgtgatctgggaggaagtaaccagcaccttgggggaatcacagacctttcctgcgagggcaagggcttccggaattgaacaggctgggcctggaggagatcttgaggggtggaccttcaggcttgtaaaggcctggaggggggtcacccgaggatcgaggccgaagatgtttactgacgccacaactgtgaaattccacaggggtcaaagacggacccgggcgggagcggtctgggctggatatccggagagttctgctctccacgggatgttagaatttgaggcagtctgcctaaggaggcagagcagagaggcatgtgatcacccagatcgtctgagagcgggacattttcccggagcggggtggaaggagtgtcaaggtgactgtgagatgacagacacgtaggggagccccacagaggacccccaagacaccctctctgttgccatcagcctgagtcatcctctatctgaaaaacttccaggactgaagttcgagttggaagcacgcgttctccttggtgaagtccgtcctgtcccaggagggctgcgctaggtctctcctctggctccccctcctcgggtcctcgtggctctctgtcgtgtgaagcggggggtcaggagcgcacaaatgtttatactccacgtgagtcacttgcacagatgacgggtgatgttttcctcgccaaggctgatggcaccgggcccctttgccgttccagcctcagtcacgcctccagtctgttagcatttagagttgctgaactttcgcattggtcaggggcgcgggcagcttgctgaccttttctgggagtcgtggcggacggagtggagccgtctgtctcgtcacagacaggcggggctgcggctggggatggccgccgcccactcgccctcagaatggccctcagcggggcttcctgacccctcagccccggtaggaagctggtgtgcactgcagggagaggcggcagctggaaaagtgttaaggccacagtggtttttccagaggctcgtctggaatgccgtggctggatctgagcctcctgacatccgaggcccctcttggtggggagagccagaaacccaagatactgccgtcagttaaagactcgaagttcacattttaaaaagtgcaaggagacacccggttttaggtacgttggggtgcaaggtctgaaggctggaatctgtggctcccttctttcagctctgtcatccctcttgtctgggtgctgcccacctggtagaaaggggacctcaccttgccactccactagcctgccaacaccaccaggaaggcgacccttcatcctggtggctccagtaaaaatcccagggaaggctctgattggatcagaagggccaagtccccatcccaggatgaatccctatggccaggggccctggagcctctgtccagtctgtgtcacatccatattttcagcccagcaatgggatctgcctgatctccaccactggggctgagcatagagaagaggaggttccagaggagaacagggggcccttatgagaagaggggagggatggtaaacaccccaaaaatgaagatattcatgacagaccccctctgatgctgaaatttgtgttgtctttggaaggtgctgggctaagctgtggagtgcctgcatctggcctggctctgctggggatgagcagtgccatgtggcagccccgtcccttctggggcttcaacacctgtcctgccagtggaggcagtggggtgggctgccttgcagcacgttaccaccccgacatgctagaattcagcagtgctagaatttcactgggtttccaagcggtgctctggagctgtgcagtcatgtacctacttgcctgaactgtggagtgaagggatttgctcattcaagtggtccctgctgccggcccaatgcagtgggaccaagtcgggggatgggctgtggcagaagcagtctcacctcagtgggagggaatgggaaagggaagcctcaggccgagacctgcccactcgtcagccctggatggggacccagctgggccatgagggtgaggaaagccatggcagagaaggctctggggtggaggcagcagaggtgctgagtgcagaaatgctggtgggctcaggagtgtggtggagggagaagggtctgagggcaagagggttggccactcagcacagagcacaacatgagcaaaggtccagagacaggatgtgcaggagagtcccactgagggcttcgcggtggatcctgaaggatcacatacactaggactcgggccaggaggtcttgtggggaggaacaagcagtgagctaagataagagttgggctccagcaggccaggtgcggtggctcccgcctgtaatcccagcactttgggaggccgaggcgggcagatcacctgaggccgagagttcgagaccagcctggtcaatgtgatgaaacctcgtctctattaaaaatacaaaaattagctaggtgtggtagtgggcgcctatagtcccagctactcaggaggctgaggcaggagaattacttgaacctgggaggtggaggttgcagagagctgagatcacaccactgcactccagcctgagtgacagagccagactccatctcaaaaaaaaaaaaaaaaaaagagttgggctccagcccagtgctgccacctgggagccatccacctgccacctcactcattcactcaccctcaaaccccacctccctggccagcagcaagctctctgcctccacagcacccctcccatcctggcttgtacctggaccacagtgttggggcgtccccatcagaacagcctccacgaaccaagggagcacccactttgtataaggccatcaactggggtggtgcagttctggttcctggctccgttgtcggcaggcagcctagaaaaggggcacggctatcatcccattttacagatggggaagttgaggcacagagaggttcaggggctcatccaaggccacacagtaaacaagaggcagagggacactaggtatggccagcagagaccttctttggccagtgcacaggtgctttttggccttttcatggtcccaagtgggtgggtcctatgatcatcaccatgatgcagatggggagactgaggctcagagggctgagactgctcaccaaggctctgcctgagcctggaggatgcatgtggagctaaacagcaggaagagcaagacaggggctcttcagggccggcccagcacaaagatgtggatttatctgtccatctatccacccacccttcatccaccattcatctatctgccacccactcactccttcttacccacctgttcacacctatgtccaccagttcacccacccacctgaccatccatacctccacctgtccatccaccccaccacccacccacccatccgcccacccacccacctgcccctatccacccatcttttcatcagtccacccttccatccacccacccatccacctgcccttccatccacccacctacccatgccacccacccttccatctacccacccacccatccatccacccatccacccacccttccatcagtctacccttccatgcacccacccatccaccctaccatctacccacctaggcacccacccacccttcacccacccacccatccatccacccgtccacccacccttccatcagtccacacttccatccacccacccacccacccttccatctacccacctgcccacccacccacccacccttccatctacccacccacccacccatccatccgcccttccatcagtccacccttccatccacccacccacccttccatctacccacctacccacccacccacacacccaccctttcatctacccacccacctatccatgcacccatccacccacccttccatcagtccacccttccatccactcaccatccacctgcccttccatccacccacctgtccacccacccacccatccatccacccatccacccacgcttccatcagtccactcttccatccacccacccttccatccatccatccacccacctacccacctacccatccatccacccatccagccatccacccaccctttcatcaggccacccttccatccacccacccatccacctgcccactcttccatctatccacccacccattcatccacccacccacccacctacccacccacccatccatctgcccttctgtctgtcacccatccatctgcccttccatccactcatccattaactcatctactgcccatccaggcacccttccatctacccatccacctgcctaccactatccatctaccaacccacccacccatccaccaatccactcatccaccatctgcccactcatccaccatctgcccacccatccacctgcccgtccagccacccttccatctactcacctatcactatccatccaccaacccaccatccaccaatcctctcatctaccatccgcccacccatccatccacccatccaccaacctacacacctgtctgtccacccatccacccaccctttcatccatttattcacccatccatccatctacccacccagctatccacccatccattcatccgtccatccgttcatccacccatccattaactcacctatacatccacgcaccctttcatccacccatccacctatccatctacccacccatctatccacccatccatccactcatccattcacccctccctccacccacttacccatccattcacccgcccatttacccatccactcaccgattcacccatctacccacccattcatctgtctatctaccgtttgcccatccacccactcatttacccatccatctacctgtccattcatttgactgctcatccacccatccagttgacaagcatgactgagctccaaccatatgttaggcatggcggtgagcaccagaacattacaggagacagaaccttgcctgctcggcttccatggggttcccctttcagccatggggagacaggctggaaacagatgatgtggcagatggagtgaggagcagggaagacaaaaatggcccaggtggggatcagggaggtggggtggctgatgagccgtagaccgaggctctcccagcgggacctggcaggcaccgccccttcatctgtagagtggggttccctctcttgcagggcggctggaggactagtggggtaaatccacattcttgcctggggccggccttgaaaagcccctgtcttgctcttcctgctgttcagctccatgtccatcctcccagctcaggcagagccttggcgagctgtctcagccctctgagcctcagtctccccatctgtgtgatggtcacgatcagaggcccacccacctgggaccggggagaggtcgaccagcacccgtgtgttggctgaggaaggcctcctttggccaagcctggtgtccccctgcctctgtttactgtataactttgggccagtggccgaacttctctgtgccttcatttccccatctgtaagatgggatggtagcagtgccccatcagagactgcctgccacaaggtgggccaggagccaagactgcacagactgggtgctccctcggtccgtgaagactgttctgatggagacgccccagcattgtcatctggacatggagagccaggatgggaggggtgctgtggaggcagagagcttgctgctggtcagggaggtggggtctgaacacccccttgtcttctgggcctttgtttggatggtggggcttcctcttgttggccttgagaagtggctggagtttggcaagtccgggatgggggcgctgtgcataatgtcttcctgtccattggccgcagtcagagccccacacatcctggactcctggtggcattggtcagaggctgggattagggcaggacatcacagcccggccttgagggcactgggcttatggtgacccctgaggagcaggtgaggggtggccacacgtatccatcatccacccacccatgcctccagcctccttcctcatctagaacacccccatgctcctgagatgacagcttgcaaaccactgcacctctaaccccctgttttctggaaggtttgagcaaggctcaggaaaggggaggccacgcagcttgccctggcttcatggtggggttggtgggggacctgcaggatgggggtggacgggcctcagctttctgctcccagctctgtgggcttcacctctcaacctgctgagcctgagagcagggagtgtctcctgccacctcactgggtccttggggtcattggtcgtggtcctttccaattgatcctcgattccgaaacctgcctgcctgccctccctgaactcccggtgtgacttgggcagcccgccaccctctctgagccttggcgtccctggccgtcacttggctgtctgggggtgccagccctgggtacagtggcctcctgctaggcactcccagatgctctgtctcctgtcattctgtccccacccagcaggcacagacaggctgaagccaaggacagacaggcagggaatggctccagatcaggaggctgggaggaaggggaaggccagggcctccttcgcaggggtcagagggcatccatgcaggacgctgtgtgagttgggccaacaggcgcaactcacggcgagccctgtctgcctcagtagcgcggggctcttggaggaggcttgagggtgggtgggtggggaggccgcgaggttagggtggctctgaccctgcctggcctgcccagcacgcctgccctcccagcacagggcgggagtggcgggttcctgtttgaaatgattcgtgaagatgttggagaaaatcagcatgtcaagcaggagggagacacagacagctgcaccctggcggcccctgagctgcagtctctgtctccctgtctctgagtctctgtccctctctccctgggtctctgtctccctgtctctgggtctctgtccttctgtctttgcatctctgtctctgagtctctgtccctctgtttctgcatctctgtccctctgtctctgggtctctgtccctctgtctctggatctctgtctccctatctctgagtctctgtccctttgtctctgggtctctgtctccttgtctctgggtctctgtccctctgtctctggatctctgtctccctgtccctggatctctgtctccctgtccctgggtctctgtctccctgtctctgggtctgtgtctccctgtctctgtcatgagacagggtcatgagagaaggtatcagtgtggttggagtctctgtctccctgtctctgggtctgtgtctccctatctctgagtctctgtgtcttcatctctgggtctctgtctccgtctctgggtctctgtctccctctccctgggtctgtgtctccctgtctctgagtctctgggtctctgagtctctgtgcctccatatctgggtctctgtctccctgtctctgtgtctctgtctctgggtctctgtctctttgtctctgttgccatctctgtgtctctgtccctctgtttctgggtctctgtctccccatctctgtccctctgtcccagtctctgggtctgtcagtggctgagtgtcctggcctgctgggacactgcggtggggccctgcacccgctcctggctctcccacttgtccatccagaagccattatctttcctccactcccacgggagccaagggaggcagagaacagcaggtgccttggaaggggcggccccttatcaggagggataaccccaggaagtagccttgggcagtctgggggagaagcagggcggccgggcctcaggggcctctgagctgtcccacgggaaagcttgctgacgtgagcgtgggggccggagcgtttgagggccagcatgaggtgccggaacccagcaactccatcctgtgggctgggagcagttcccagtgctgtgaaacattgtggtcaccatggcaacagtactgggggagctgcctttgtggaatgggtgggaccctgcctctttgcaccttttaccctcgaggcacgtgcccaagagccagtgaggactgcagctgctggtggccaggggtgggggtggcgggggagcaggggcacgctgggccgcggtgttcccatcttggagagggatactgagcctgtgatctccccggctgctggggatttgtgaggctgcatgtgaagacctgtgcctgcttggcaaggtcagagtgggtgggaagggtcatgagagaaggtgtcagtgtggttggagagtagggtggtggctgtgaggctgagaggttggtggtgggattccaggccccccacagctctggcactcgagccccacaccacctcccacactgcctggtcgctgtcacccccacccctgccaccatttctgcttcccttcctttcactggctctctgttcctctctccctgtatttctctccttgtctctctgggtctctgtctccctgtctctgggtctctgtctctccctctccctctctccctgggtctctgtctccctctctccctgggtctctgtctccctctccgtctctctaggtctctgtctccctctctccctgggtctccgtctccctgtctctaggtctctgtcttcctctctccctgggtgtctctttctctccctcttgctgggtctctctttccctctccctctggatctttctctccatctccctctctctgggtctctgtctccctgtctccctgtctctaggtatctgtcttcctctctctctgggtttttttctcctcttgctgggcctccgtctctccctctccctttctctgggtctctgtctccctctctccctgggtctctgtctccctctctctgggtctctgtcccctctctctgggtctctgtctgtccccctgtccccctctctctgggtgcctgtctccttctctctgggtctctgtctccttctctctgggtctctgtctacctttctctgcgtccctgttcccctctgggtctctgtaccctctaagtctctgtccctttatctctgaatctgtttttctctctctgggtatctgtccacttctctctgggtcctgtttttctttctgtgggtcccggttcttctctgggtctctgtcccctccaagtctctgtcactccctctccgagtctctgtttccctctcttgctggatctcagacaaggctctcaggatggtcttggtccagttgccagcctgggactggctgggagagaggctagggattgggcagtggcttctcagccggccctgacatcccctgctgtcccctgaagtacagcctcttccccacccatgcactgagaccctggggcggcatcgcatcagccggggtgggagccaaccagctgtgctgtgctgctgtgctccttcgagccacatggacaataaaaccaaaattggctttgaaagtggaagtgctctcctctttgaggggaagtgagggactgcgcgcgtcagaaccgcctatgaggggcaatgccggcaggctccgttctggcccgagcgctgggctccgcgtgggggtgggaaaggattttacaaaaccccaaagaaatgtttccatgaaattctttcttgttcttgccttttttttttcttttttggacattccaatgaaaagaaccgttctggggctttggatcgcttctcatgggttgggaagccgaccatggagatgaggccagcccggggccggaggaggggcgcctgccctgacaggtgcgtgcccctcactcttgtccccctaggcagcccccacctccctctgctcctgatcctcccacgaggcttcatccctagggtgcctggccgcaacctctgcaactctgagcttcttgtgacctcccccacgaggccatcgtgccttgggctgggttcccccagagcagactctcaggcgggggttcgagggccccacgaaagaacagcgtggggagggaaggagcctccacagggtgtgtcagtagtgagcaggtggtcccagggcaacccttggagatctcgggaatcccataacaggtggtccacctgggggagtttaccccacccaggctccctggatgttagccctagcacatccctgcactgggacatctgagaggagcaggggtggtgttgccagggcagacctgggcgtgtccttgggtccagcacaggcctgggcctggctagggtgcccgatgacattgctggggggatacagcggcaagcgggtgtcagaatggcccctagcccgggccaggcctgtagcgggggcgtgtggccactcagaggccagattcgggcagagggtgcagccagggcgggcagcaatggcctcttgagacggccctggccggggctgctgacgcattggctccgatgactcacgtgcgggtgaccgtcactcgagtggccgtctggagactcggaccggctcagggccaccgccttcctgggggcctgtggccccgccgtgccggccgccccctgtctggaccagcctgagtaatgggtccttcccctcctcccagtggccggctggagaggaccttagtcatcagccctggccccggccctccctcctccgcctgcccacctccgcccaggctgcgtctcgcttctccgtccaggctgggggactcctgcccctcctggcctcctccctccttgagttccccaggaggggctgcagtggggtgggtttggcttcacaggggcggcagtgagggtgacgtcaggggcctcagggacagttgtcccatccctaagatgagaggaaggaaacagccatgtggaacgcgtcaggcatcaccagggcatgaggaggaggcctggggaggacaagctgcttcctcccctctttggtccagcgtgggccctgtgccctgtaaccagcagtggatgggcctcaccctgctttctgggcctggggtgtcctaaattccagatgggagcatccagattctccgagtgtgtagtcgtcacgtgctagtggcagcctgggtcccagggctctgcgtttgctcatctcatcctccagcggccctggggctggggagctggatggtcatttgcccctgctttgtagctgaggcctgggtggttgagtgactgctgagttcccagctaaccagagctggcttggcccaggctgctggcccctgatgtctcctctgagatgccctgccagtcagctgaactgatcctgccttctgggttccgggcaccctctctgcttgctggggaacccacagatcccatgtttggaacactggcccacctccctggtttcctgttcctcagtcatcagagtagcagggtgcagggcagtagctcctctcctccccagagggaggtcctctctgtccaacttctcagttctccagatatgttctgtgcactcatgggcagatgcatatgtgtggcactttgagcccaaatagcatcccactgtgtgcactctgcctcttccttcctcctgcagccttgacgtcatcccctgcatgcaacatcttccccaggatgcgtcagcctcctcacccatctatagggcagccctcactcagaaggtgctgtgattccacgaatctcctttaagggtggttagcttatttctcgtctgtggcccctagagattgtatttgggtaagtttcagaaatagagttcttgggtaaaggacatgagcctttagagtgttgctgagtctacgcagctgccttcctgggggtcaccttgcttcataagccccccgagagtgtgcttccctgactgcaagcgaggctgactcttacgtccttctagccagctctgcttgctttcctgggaaccattagcccacattctttgtgcatctttcgatctcactctgtcacccaggctggagtgcagtggcacaaatatggctcactgcagcctccacctcccgaactcaagtgatcctctcacctcagcctcccaagtagctgggaacacaggctcatgccagcatgcctggctaatttgtattgatttcttgatgctctttatatatggaagagcatggtaaatatgctcctaaggactgagtggccccgtggtgaacttgtcccagtgcaacgtgtttcttctgatgaaaatgtacacatgcacacctgcctccaagggctttacaggaggcacgagaagtcctcccatccctccccgcaaatctccttgaacttctaaggaaaaaccagaccaaaatcaaaatggcaaaggctggcaaggcccatgcatacttctgggagacaaagtgtccacagaaaggccggcaggggtcacccagagcccgaatgcacaacccttgccacagctgcaacacaaagctgattctgggtgatctgaccccttttggtccccattgcctggaccgcgtgcccatgaggacggggcctacttcgtctcatttacgcagcatccctgcatgcacgggcagggaagaggagtttgcaaagccagtgaggcaaactggggacaaggagagaccttgagggtcctcagaggcacatgcaggatgcggctttggccccaggcagcctggacacccgtcgcagggtgtcggtgagagggcatgccattcgtgggaagcaatgagaccctgccctggagatgtccaggcaggtgctggacccctgtggggggctggataggggagagcggcccatgagcctgcgacatgctcctcacaagcctcggatctggatctgtcatgggtctagggaaaaaagagccaaggcttggctcagggcagcagcctggtcaagtgggatcggggccgatgtgtggggaggggaggaagggaggaggggaggtaagcgtcccttccacttggcaggggaaaggccacggggacaagccagagtctcagggtgcacctggacccctttccttccctgccctcctcagctttcaaaaggctgcacccccaccctcccaggcaaacaccaggtctgggctccagcacccccagcaccgcagcattgctggccagcccagatgaccgtggcattgggctctgagtagcatatgtcctgcttccccagggactcaaaggctttccactgagcacaggccccacactgggtccttcgtgctatgtccccaccctctaggacatgcagtgcctcgcaggcagggctggggcttgggcaacttctctgcctgtggtgccttgcagggctgtggtcagcgcctggccctgaagcccctctccccggcagtttgtcttgatcactcaccctttcccaagggtctctggaagggtggtctgaaggggaggtcagggacctccggtggcagctgctatgttgactgagtgcccactgtgtgccctgtgtttgacgttggctctttaatgcccactgtggttttggggctggctggcagtggggccaaggagccttccgtctcctcccgctttcttggaaagatcagtgcccgcattcctggcctttgcttacaggcaggcgtgggtcccaggaatgggagagcaaattccagagggcagaggccaccaggacagagcagggtgcctcagcccggtgggggtgggggtcttagaggggactgatcctggaggtggcaccagggtccaccccctgttgtgttctgaggaagaagtggtgtgttaacggctcctaagctattaattcattgatccgttcaacagtttccccaaatgaaatagcaaaggggtggtggggctggagaagaggggatgagggggcagtaggggcagtgggggctggaccacagagggctcgtatactctggggtgcagggggctgtggcggggcttgcaggggacttgagaaggctcccgtgtgtcctttggtttttttattgaagtgaaattcacgtgacataaaactgtctgaaagtggacaattcagtggcatttagtagattcacagtggtatgcaaacaccacctctgtctagttccagaacattctcatccctccaaaaggagaccccaccccatcagcagtcactcccccctcccctcccccagcccttggtggcacccatctgcttcctgtctctgcggatttgcctgttctgggcatttcacgtcagtggagtcatacacagtgcggccttttgtgtctggcttcttgcactgagtgttgtgttcaaggtaatagtgtgtgtgtgaacctctgggccatgtccccacctctgctttccccgcagcacggccgacaagaacggggccctcaagtgcaccttctcggcacccagccacagcaccagcctcctgcagggcctggccaccctccgcgctcagggccagctcctcgatgttgtgctgactattaacagagaggcctttcctgcacacaaggtcgtcctggctgcctgcagcgactacttcaggtaagtgctggccccaggcagctggaaggggcggctgcctgttgggacagggacagggcagatggcacccactttctaaagggggcctgtctcagcgctacccagggacagcttcgagggagaacggctggtaccggctgctctttttttttttttgagatggagtctcgcgctgttgcccaggctggagtgcagtggcacaatctcggctcactgcaacctccgcctcctgggttcaagcagttctcctgcctcagcctcccgagtagctgggagtacaggcacccgccaccatgcccagctaattttttttgtattttttagtagagacggggtttcaccatgttggccaggctggtattgaactcctgacttcgtgatctgcctgccttggcctcccaaagtgctgagattataggcgtgagccaccgctccgggccccttctgattttagagagaggtttaatgtccagtaaacctgcaggtttcccggagtttgcatcttactctctttgggcagaacatgcctggagggacagagatggcctgtgggcacccactcacttctaccctgcatgcagggtggcagggcttggccaggtttttgatctgttttgttttttttttttttgagacaaagtctcgctgtgtcgcccaggctggagtgcagtagcacaatcttggctcattgcaacctccgcctcccgggttcaagcgattctcctgcctcagcctcccgagtagctgggactacaggcgcatgccaccacacctggctaattttttgtatttttagtagagacggggtttcaccatgttagccaggatggtcttgatttcctgacctcatgagccacctgcctcagcctcccaaagtgctgggattacaggcgtgagccactgcgcccagcccaatctgtctttacttgacgcctgctgtatgccaggcactattctagtccttgggatgcagcagggatgacagtgaaatgggcacaagcccctgccctcagggcatcccctcaggacacctggagcaggacagctgggggactggaggggcatcgagggccgcagagaccctgtgtctgccaacaccatgtcctgggctctgtctgaggcccagatgagttctcctccctgtctccctgagctgtgggcacttccccaacgtgacagaagaggccatggcgggcactgtctgtctgtccctgtgccgtggccgggccggaagtgagagcaccacagagcagggctgtggggtggggggtgctttctcctcgccagctgggggctgttgcagggctgagtggtctccctccctgggtgaccagcaggtgagcctccttcctgccaggtggtgaccccgccagagagagctgggccgccctggggaggctcccaggccccagcccaggtgtgccgctcagccacacattccccgaggcccgggccgcctgccccatgggctcaatgaggctgttgtgggggccgcagcagccgagccaactggggcgccgcttctatttttattctggatttggggacgggtgggccagcccagccagcaatgccctttaaaggctcccctgtgctggcactgcagccagcgagaccttaaaaggcaaagctccctcctgtcgcctgcgaccgcctctgccttcatcgcatcatgcccgagggccagcgtggacccgtggggacaagcggggcagggtctggggagctggcagcgtacttactgctcctggaccgctcagagatgctgaagagctgcttgttgggcagatgtcagtgggcggccccgagatagtgccctggcagctgtccttgcccctgtagccctgagcctggctcacaggaggtgcaagactaggggacaggcctctgtgggtcaaatgcacaagggatgttccctcctcctcggacggccatcaggggaggtgcactggcaggagtgagagttactatgccatgccattgcgcctcctggaaggaaccgcccattcccctggagctggggtgctctcccctcttctgctggggaacaccctaaacgctgtaggggaactgtgacctagaaccgtgtgcctccccgctgccctccctcacgggggcctgtgtcccctcccactctcatgttctgcctcgcagagcacagcagtacaagggcggagctggggtctcaatggaggctggggacgtagctgttgggtgggaggtgcttccccgaccacctgagcctgtctctggagacagcagtcaccccagcacagcctcctggtgggggctccattcctggggaccctcattaccttcccctcttcacatgatggttgttgagactcaggctgggcatatcagagctgcctgcttaggtcagtgaacaaggtgagggttgaactgtggtgcatggcacctccagagcactggccttgcagttcctgagctcaggtgtcaagtggggctgcagatctgtccccagagccacagggtgtgttctcatcctgcactgccatacctggcccctctaaccgcacccccgacaggcacattgtgggtgaggctgacccgggccaccgctcctgcagctccaacacgatctagtcatgaaggggcaggggcagggtcctctgcagaggggccaagcagggagttgctatttataggaagatgcatggcttgggtggattcaaaatctttttttttttttgcatgttttttttgtttgtttgagacagagtctcactcttattgtccaggctgcagtgcagcatgatctcggctcactgcaacctccaggttggtcttgaactcctgacatcaggtgatccacccacctcggcctcccaaagtgctaggattacaggcgtgagccactgtgcctggcctttgcatgtttttgtttgtttgtttgtttgtttgtttttgtgactgagtctcactctgtcacccaggctggagtgcagtgccagtggtctcgatctcctgatctcatgatccacccgcctgggcttcccaaagtgctgggattacaggcatgagccaccgcgcccggcccctttgcatgtttttaatgagcattccgcctactttcctcttgctggctgtgccctgtgttctgtgtccccaggctactgttccccaggccagatcattcctggctggccaaaacacccctcagccactgccagccacacgttgtgtttctgcccttcagggccatgttcaccggcggcatgcgggaggcaagccaggacgtcatcgagctgaagggcgtgtcggcccgtggcctgcggcacatcatcgacttcgcctacagcgccgaggtgacactggacctggactgcgtgcaggacgtgctgggcgcggccgtgttcttgcagatgctgcccgtggtggagctgtgcgaggagttcctgaaggcggccatgagcgtggagacctgcctcaacatcggccagatggccaccaccttcagcctggcctcgctgcgagagtcggtggatgccttcaccttccggcacttcctgcagatcgccgaggaggaggatttcctgcgcctgccactggagcgcctggtcttcttcctgcagagcaaccggctgcagagctgtgccgagatcgacctgttccgcgcggccgtccgctggctgcagcatgacccggcccggcggccgcgcgccagccacgtgctctgccacattcgcttcccgctcatgcagtcgtccgagctggtggacagcgtgcagacgctggacatcatggtggaggacgtgctgtgccgccagtatctgctggaggccttcaactaccaggtgctgcccttccggcagcacgagatgcagtctccgcgcaccgccgtgcgctcggatgtgccctcgctcgtcaccttcggcggcacgccctacaccgacagcgaccgctcggtcagcagcaaggtctaccagctgcctgagccgggagcccgccacttccgcgagctcacggagatggaggtaggctgcagccacacgtgcgtggccgtgctggacaattttgtgtacgtggccggggggcagcacctgcagtaccgcagcggcgagggcgcagtggacgcctgctaccgctacgacccccacctgaatcgctggctgcgcctgcaggccatgcaggaaagccgcatccagttccagctgaacgtgctgtgcggcatggtgtacgccacgggcggccgcaaccgagccggcagcctggcctccgtggagcggtactgcccccggcgcaatgagtggggctacgcctgctcgctgaagcgccgtacctggggccatgctggggccgcctcagggggccgcctctacatctcgggtggctacgggatctcagtggaggacaagaaggccctgcactgctacgaccccgtggccgaccagtgggagttcaaggcgcccatgagcgaaccccgcgtgctacacgccatggtgggtgccggcggccgcatctatgccctcgggggccgcatggaccacgtggaccgctgcttcgacgtgctggctgtggagtactatgtgccggagacggaccagtggaccagcgtgagccccatgcgggccggccagtcagaggccggctgctgcctgctggagaggaagatctacatcgtcgggggctacaactggcgtctcaacaacgtcacgggcatcgtacaggtgtacaacacggacaccgacgagtgggagcgggacctgcacttcccggagtccttcgcaggcatagcctgcgcccccgtcctgctgccccgggccgggaccaggaggtagcccccaagacccccgggaccctggcctgaccgcatgttgtctccaagtggggcttggcgaatgcacgtctgcctgagaaccccagtgccccccttcgcccgggctgcccttgaggggcctgctgcgttgataagcccccctcccaggggtccctccctccctccttcccaaagcagatcctggctgcgagtccatccgagggagcctgccggcaaagcgtctgacatgtggtggcagcaaattcgtccccggggtggtttcctcgcctggcccccgagtccccacgggctggcgggtggaatcccaggtctccagggggtccctgtgcagctccatctcacttctctactgcctcccagccccacggtttcaggcattcagatgtgagctcatcaacattgaacccaaagtcggtggtatatgactcaccctccttccaagtctcctgcgcgcgtgtttttaaaataaactcacccgaaacgtccgtaacacacggacctccaggagcagtgagaggtggcttagaagcccctggtttggggtgggtggaggaggagggcacgtgtctgcctcccctggggtgccctccttcccccatcccaagctgctgaggggaggccctggtcatgcctcagttcctgccttcatctgctttccggaggaaaaaccatatcaactcctagaaacgctccttaggggcttgggaccttccatttggcactgagcatcttgtggggccttaactggctgagacatcccggccctctacatttgccctgttggccaggcagtccccttcccgcaattggagggcgacgctaacttcagaatcccatagtggcgcttgccgcaggtctggtggggtgtcttttttctcctccctcctttccacccctccgcgccctgccactccctggcctgccctgtttttgggtcaacattgctacggagccagcagtgaggcctttcccttcaagggctctgtggtatctctggccacatttgttctaatgtctgaacctctaaatcttttctttttgattggttttactgtttttaagaagccagcactgctgtctcatagatgggatttgtactcttggggcaacttaaagtgtctctctcgctgctaacagacgattgatgtcttgtctctgtgacccactcaccatgtaaagaattaacctcctatcttagcagacatcgtctcctaatatttccctttatttaataaaaatgttatggtgaagagatggagccggcccagcactgagcttgtgcggcttgggtctgattggtcacagattcctcgtgtgtcctccgcgtgtctgggggctcctctcccccgcctcaaccttttccagcctttcagaggagtcggcagtgggctgggctttggctcaggggcgcagaggcagcaggaagcgtggccaggactttcaccctggcgttttttgttgttggtttttttgtttttttgagacggagcctcgctctgtcacccaggctggagtgcagtggcgtgatctcggctcactgcaacctctgcctcctgggttcaagcaattcacctgcctcagcctcccaagtagccaggattacagacgcagacacacaccaccacacccggctaatttttgtatttttagtacagacggggtttcaccatgttggccaggctggccttgaactcttgacctcaggtgatccacctgcctctgcctcccaaagtgctgggattacaggtgtgagccaccatgcccggaccaaccttggcactttggaagagccttcagccccctattctcatcatggccggccaaactatgaactgggctgcccagagcaggccacttatcagttgcaggttagcagagaaagcctgatgttcccggacggccttcccagaagggaggccctgggatatcacacacacatggatctccataagttgctgtgcctgcatgcctggcgctcctgtgtggcagccatcggggctggggtaacactagaggctgagggggtgggcagtgctaaaataggaacatggttgggaacctaaaagaagcccacactgtcaggggcatcgagacaaaagccgagttccctggggacttaccagaacattccagccccacccccgacctgagctcccccaaagagaacccttccccactggaggcatggccccttcaggggagcagtgagaagctttgccagctgcaagtcccctggatcagctcacacctcagaacatcttgtccccagtgagctggcaggggcgccggcccagggcggggggcgctgctgtatctaaccggatcgattgtgcataaccgtctaggccggttcgtggaatgttcgtggggccccctgcccctccctcagcctccccccgcatccccccaagaaaggaaaattatttttcgtattgtaaactttaaacatgaaaaagctgtttttaatttagcagaaactggcttgaatcttcactttgtgaacgtttgtgtccttcagaggcagaatatgcctgcgcacactcgcacatgctcatgcacacacctgcacacgcatgccgcaacacgcacattcacatggccgtgctcgtgcacgcctgcacacgcatgcttgcccatacccacgcattgcagcgcgttcacacgctcacccgcacacagtgaaacacaagctcacacatatgcacacacacacatatctgtgcatgcacccctggaccagcgtagcccaatctgcctggcggcccaaaggggtctggagcccggcaccgccccgagcctgggggaagcctgtctacttccagatgccctgcctactcgctgaggcctggacgccggctgcaggagcctcccttgcacctgggctcaggctgtgggaaaacgctgtctctcgggacggtcagatgcaggcccgcaagagggaggccaagtgcgacttctggggcctctcagcaagtgagggccaagggggcctctggggagccgtgtgaggtgggaatccgccccggacctggccagcttggaaacctgcccctggctctgtctccgaggaagcagctccagctcgtccgttctcacgggccctggagattcactttgcacggtgcagcctcggaccctgctcttcctcggggcgcctgaccgtggatctcagcggcctggcgcctaacacagagcctggcaccgacggagcatagctcgaatgtttgctgcacaaaggagaggtgctggggcgggaaggtgagggcagccttcttcacactagtggccgtgggcaccttctgtgtgcaaaccccggggaaaggagggcaccaagccgtgctccacccccagcaaggcccctgctttgttctcgtcttcctgtcgctctcattctggtggccagccgggcagccattcctccctcctcaccatcagatccctgatttggtgccagcagcaacgtgcccagcctctggggttaagattcagctgagccgttcttggcaatgccttttgccggggttgtttgtaatctgggcgtgtttcccagctctggccagcaagcttgaaggggtcgggtgtttctggacaagggagagagaggccttgttgcccccttcccttccttactgcttcttatgaggacacaatgccaggggcttctgcagccatcttgtggccaggaggagcaagttaagagagcacactcaggctgggcgcagtggctcacacctgtaatcccagagctttaggaggccgaggcaggagggttgcttgagtccaagagttcaagaccagccctgagtgacatagtgagaacttatctctacaaaaaaaaaaaagctcgtcagggtgacacacgcctgtagtcccagccactcagggaggctgaagtgggaggatcacctgagcccaggagttctaggctgcaaggagctgtgattgtaccactgcactccagcctgtttttctgagcctggttttccagccttctcatcacttctgtgagctaccaaacaattttttttttttttttgagacggagtctactctgttgcccaggctggagtgcaatggcaccatctcaattcactgcaacctctgcctcctgggttcaagcgattctcctgcttcagcctcctgagtagctgggattacaggtgcatgccactactcctggctaatttttgtatttttggtacagacgaggtttcgccatgttggccaggcggtcttgaactcctgacctcaagtgatctgcccaccttggtctctcaaagtgctgggattacaggcgtgagccaccacgcctgggcttttttttttttttttttttttaaatagagacagagtctcactatgttgtccaggcgggttttgaactcctgggctcaagcaacactcctgccttggcctcccaaagtgccgggattagaggcatgagccaccatacctagccaaccaaccagttttgcaatacacacattggctatttaaattgtccaggctggatgcagcggctcacgcctgtaatcccagcactttgggaggctgaggcaggcagatcacttgaggtcaggagttcaagaccagcctggccaacatggtgaaaccctgcctctactaaaaatagaaaaattagccaggtgtggtgattaatgcctgtaatcccagctactcgggaggctgaggcaggagaattgcttgaacctgggaggtggaggctgcagtgagccaaaattgcaccactgcactctagcccgggcaacatagcaagactccatctcaaaaaaaatttaagtaaataaattgtctagagtcagtttctgttgcttacaagtaaaaaccctgacatgagatgggaatactccagcatctgtcacatttacattataattttggaactgcttggtgacaagcatatctggccattagtgttttctgcagtgcagacattatttctcataacaaggagactggaggtcagaggtgccaggatgttatgactggtggcccatgatttctgggagggggcatgactatgcctctctctttctttctttctttatttttttttggtttagagactgtattcccagcactttgggaggctgaggcaggcagatctcttgagctcaggagttggagaccagcaacacagcaaaaccctgtctctacaaaaaatagaagaattagcctggcatagtggcatgcacctgtagtcccagctacacaggagggtgaggtgaggataggttgagccctgaagatcaaggctgcagtgagctgtgattgtgccactgcactccagcctgggtaacacagtgagaccctgtctccaaaaaaaaaaaaaaaagaaaaaagaaaaaagtaaacaagggaatcaaaggcgtgaggcaactaggccttcagctgaaattatgccagaggacgatcctgccaccactgcagaatccagacgcctccgttggcactgccatctgccctgggcactcagccacagctgcccctagaaaacagatggccctgccccgatgctgtttctctgtagcacttgtgcctgcatggaaacatcccggaggcccaaccagtatcccacgccattccccagctgtcccaggagtggtgaaagtgagtacattcgtgtgtattagtcagccactgctgtgcaacaaacacccccaagtctcaatggcatgcaacaataagcgtttgtttttcacatgtctgtgagtcagcagaggtggtgtctgctctaggcgggcctcggctgggcagctctgcttacaggtgcaaggatgcagagtagcccagagtccctgctccacgggttcttgcctcctgctggaacagcagctagccagggcacattttcctcctgcaagtgtctgaggacaagtggaatcacgtgaggcctcgtagggtctcagttcgggactcaaacactatcacatctgcccgtaagtcttttttttttttattttgagatggagtcttgctctgttgcccaggctggagtgcagtggcacaatcatggttcactgcagcctcgacctcctgggctcaagtgatactcccaccttagcctcctgactagctagaactatacgctcatgccaccaagagcagcttattcatttatttatttatttgagactgaatctcgctctgtcacccaggctggagtgcagtggtgcaatctcggctcacagcaacctccacctcccaagatcaagcgattctcttgcctcagcctctcgagtagctgggattacaggtatgtgccaccacacctggctaagttttgtatttttaatagagacggggtttcgctttgttggccaggctggtctcgaactcctggcctcaagtcaaccacctgccctggcctcccaaagtgctgggattacaggcatgagccactatgcctgacctgcccataagtctttggccaagcaaatgacatggctgagccccacatctggaatggggaagtgtcttccacctggaaggaagaactgtagagggcagggatgcaggaataggtgggaaccgcggccaatagttcgatgggtcacccttggcttgggggcctctcttgttagcagggtgaccaacttccctctgtggggggactccccaaacttggatggggaccctgatgctggcaaccaaaaagaaaggcccgttctgcatctccttagcagccactgccccctggaggtcgagatatccctcttttttgtttgtttgtttcaggtgagtgggggctgtgagtgccccaggatcttggaaagcaggatgggggtctggatgtagggaggtcaatggggccttggccaagtttcagggcatggacactgtaggtgtccctgggagcatgcccaagtctctctatgttgcccaggctggtttcaaactcctgagctcaagcagtcctcctgcctctgcctcccaaagtgctgagaatataggcacaagccaatgcatccagccaaccaaccagttttccaacacgcacttcagctatctatccctcagcacaagtggctgggtccctagacttgaaccatgggtcccccgcctgcccagttccagcctctcactaccctccttggcggcccaccccgtcccaccctccatccaccactaaagcctgggtgggaggacgaggggcctgggtcctcctgtaaccttatcgtaaggaggggcatcgctggcttctcttgggtcctttccctctctcttcatgatcagacccagcttttgctttgccctttaaaaactctgtacgatgagagcctcttttggaagtcaaagacagaccagggattgttttcctctttgcctctcagctccaatggccctaattcacctccacacgacgtgggtaccccaaatcgactaagatcccatataaggaagagctgagaagcaaagcatgaaaactaacatggcgaagtagcgttttgctttcctaacagttgctgagtgcttggatgaagcaggcactgagctaagtgctttccatgtgttatctgtttcatctttccaagagcctgctatgaggagcaccactgtccacatttagcagaggagggcagtgcggctcagagaggtgaagacagttttccattgtcacacagcttgacaactgataagtgttggaccacacagaaatgctcaagagtttcttgatctcccgggtcaagcaattctccttcctcagcctcccaggtagctgggtttacaggcgtgcaccaccacgcctagttaatgttttttttgcatttttagtagagacggtgtttcaccatgttggccaggctggtctcaaactcctgacctcaggtgatccgcccacctcagtcccccaaagtgctgacattacaggtgtggaggtggaggttgcagtgagccgagttcgcgccactgcactccagcctgggtgacagagcaagactctgtcttaaaaacgcacaaacgaatgaacaaaaacacataagaaatcacgtgtgtctgtgccctttccacattccacaggcacacagggaactctggcctggccctggcctctttgggaaaggcgaacataatctcagctcaatctacaagggatcagatgagaccgcacaaacagctgccttcagagaatgggatgtttctgggtcatgggaagagacgctggaggtccacttcagctagacccttcaggagggtctctcagagcagaggcctgcaagtcgagaaggagccagccacgaaagcatcttggaggagcgcaatccaggcagagggaacagcgaagaggcccgtgtggctggagcgagagccgagccgagcataagcatgtggagccgccaggaggagggtattttttttttatttgagatggagtctcactctgtctcccaggctggagtgcaatggtgcgatctcggctcactgcaacctccacctcccgggttcaagcgattctcctgcctcagcctcccgagtagctgggattacaggcacccaccatcatgcctagctaattttcatttttttttttttttaagagacggggtttcaccatgttggccaggctggtcttgaactcctgacctcaggtgacccacctgcctctgcctcccaaagtgctgggattacaggcatgagccactgcgccaagcctttagattttttttttttttaagtgcgatgggagtgtgggatctgccctgctttgcaaagcccgcagggctgctgtgaggagcagtgttggaccacactgggtgacagcaagttcctttgatgaaggaagaaagtgaaaacctcagggttggtttctgcccgggtcactggacactgaagcctcgcccttctcagggctgggggtcagtggagcaagaagcggggcttgggctgctgtctggccattgcacaatgagcgggctggctgcttcctctgactcatcaccagggtttaggatggatcaagtttcatgccaggcgggccgcggggtgaatgggggtgagtaggaagagcagcagacttacttctgcacatgcccaggatggctccttgctgtaacccctgctagtccccaaaatcttttctcttccatcttcctgtgtctggaaactggcttagtgcagatatatgtaagtgatcagggtaagtggcatttatggagcacctcttagtgagacacatattaacatatgttaacatactaacatattaacgtatgttgacacatacgaatttcatttaaagcctacagggccaggtgcagtggctcacgcctataatcctagcactttgcgaagccgagccaggaggatcacttgaggtcaggagttcgaaagcaacctggccaacatggcaaaaccccgtctctactaaaaatacaaaaattagccgggtgtggtggcctacacctgtagtcacagctactcaggaggctgaggcaggaaaatcgcttgagcctaggaggtgaaggctgcagtgagccgagatctcaccactgcacgccagcctaggagacagagcgaaactccatctcaaaaaaaagaaaaaattagctaggcgtcgtggtacacccctgtaatctcagctactcgggaggctgaagtaggaggagaattgcttgaaccagggaggcggaggttggaagttgcagtgaacagagatcgcaacactgtactccagcttgggtaacagagcgaaactgtgtctcaaaaaagaaaaaaaaaaaaagatacatgtaattgattagggtaagtggcatcaattacggagcacttcttagaagtaaggcagttgacacttattaacttcatttattttatttatttatttatgtatttttttgagatggagtttcacttttgttgcccaggctggagtgcaatggcgcaatcttggctcactgcaacctccacctcctaggttcaagcgattctcttgcctcagcctcccgagtagctgagattacaggcatgtgccaccacgcccggctaatattgtatttttagtagagacggggtttctccatgttggtcaggctggtctcaaactcctgacctcaggtgagccgcccgcctcagcctcccaaagtgctgggattacaggcgtgagccaccacgcctggctaacttcatttaaagcctacaaaactcagtgtgtgaaagcagctgaggtcggctgtgaggcctgagttttggtgcataagttgctagggcagctgctgtccctgctctctgtctttatttcttctctgacctcacaggatgctgtcaagaactagaagccggtcaggcgtggtggctcacgcctataaccccagcactttgggatgccaaggtgggagtatcatctgaggtcaggagttcgagaccagcctggccaacatggtgaaaccccatctctactaaaaatacaaaaattagctgggcgtagtggcgcacgcttgtagtcccaggtactctggaggctgatgcaggagaatcacttgaacctgggaggcggaggttgcagtgagccaagatcgtaccactgcactctagcctgggagacctagcgagactctgtttaaaaaaaaaaaaaaaaaaaaaaagaactagaagccacatatgtagcgggcccagtctcgcattggactcacagaagctgcagtctcagtcagaaccaggaacagaaaaaggacttgaaatagatttaggcaggccaggcacggtggtgcacacatgtaatctcagcactttgggaggctgaggggggcggatcacttgagcccaggagtttgagaccagcctgagcaacaggatgaatcctgtctctacaaaaaccacaaaacattagccaggcatgatgatgcacacctgtagtcccagctacctggaaggctgaggtggggggatcacctgagcctaagggttggggcttcagtgagcatgatcatgccactgcactccagcctgggcaacaaagtgagaccctgtctgaaaaaacaaacaaacaaacaaacaagaaaacaaatagacaagcacaaaagggaataaatttttggcctacataacttaaaaggcaggtgagtctagcttcaggaatggctggatccagaagctcaggctggagtacagtaatgtgatctcggctcactgcaacctctgcctcctggattcaagctgttctcctgcctcagcctcccaagtagctgggattagaggcatgtgccaccatgcccagctaattttgtatttttagtagagatggagtttccctatgttggtcaggctggtctcaagctcctgacctcaagtgatccacccaccttggcctcccaaagtgctgggattacagttgtgagccaccgtgccaggcctggttctgttttcctctgtgtgggtccactcttttggcccagctgaactaatcttttgtttttttttgagacaaagtctccctctgttgcccaggctagagtgaagtggcgctatcttggctcactgcaacctccacctcctgggttcaagtgattttcctgcctcagcctccccagcagctggaattacaggcgtgtgccaccgcgtctggctaattttttttgtatttttagtcgagatggggtttcaccatgttggccagtctggtctcaaactcctgacctcaggtgttctgcccgcctctgcctccaaaagtgtagggattacagtcatgacccagcgcccagcctgttttttgtttgtttgtttgtttgtttgtttgagacagggtcttgctctgtcacccaggctggagtgcagtgcattatcatagctcactgcagcctccatctcccaggctcaagcaatcctcctgtctcagcctcctgagtagctgggattataagcaggcatcaccacgcgcaggtaatttttttatttttagtggagattaaatctcgctatgttgcccaggctggtctcaagctcctgggctcaaatgatcctcctgcctcggcctcccaagttctgggattacaggcatgagccacaacacccagcctggcctgaaccaatcttgatggccagcacaatgggctatgctgattggccaagacttccaccttagggaggggtgtttgtgtggtgggagagtggtgagaccagccattcacatctcacagactgaaagtcagaaccagtgttccccaaataagggttgttgacactaaaaagttgagggagtgggtggggttgagagaaggaatatgcttgttaggcaaaaagtataggagcttaccaaagtgcgcaaaatcatatcaagaaggaagatggccgggtgcggtggctcatgtctgtaatcccagcactttgggaggctgaggcgggcggatcacctgaggtcagaagttcaagaccagcctggccaacacggtgaaaccctgtctctactaaaaatacaaaaagtagccgggtgtggtggtgggttcctgtaattccagctacttgggaggctgaggcaggagaatcacttaaaccccagaggcagaggttgcagtgagctgagtctgtgccactgcactccagcctgggaaacagagactccgtctcaaaaaaaaaaaaaaaaaaaaaatcccataaaaattagctgagcatcatggtgcatgcctgtaatcccagctacttgggaggctgaggtaggagaatcgcttgaacctgagaggcagagattgcagtgagccaaggttgcgccactgcactctagcctgggcgacagagtgagactctgtctcaaaacaaagataaagtagggcagtggcaatatccaaggcattctaaatgaaaatcgatatatatatatatatatttaacatgagcattttattacctgttgtaaagcatgaatcaaagcatgtttggaagatgtcagcatcccctccagccatcctcagtccaataaaatgtgtgcttgttgtgccattagagccatcatcaattcccccagctgaccttcctagcttccacccagcccatactctgaaatccctgcagcctcctgaatataaactttcaatattggtggttgggggtccctctcttgagggagggagggttagagtccctcctgcttccctggcttaccactctgccatcgggggagtctctgctccttccttcactgctgagtcttgatgggatttctggacccttctgttagcaccttgttgcaaaatagagatccttgaacaagactggactggagaagtatgcagagggaaggctgaagctctgtaactccagttctttgggctcaggtatccagagaatagcaatatgcccattgcaagggaatgggaaaaagtagtcgtcggctggacatggtggctcacgcctgtaatcccagcacttagggagggcgaggcgggtggatcacctgctgtcaggagttcaagaccagcctggccaacatggtctttagtctctactgaaaataaaaaaattagctgggcgtggtggcgcctgcctgtaatcctagctactggagaggctgaggcaggagaatggcttgaacctgggaggaggaggttgcagtgagccgagatcgcaccactgcattccagtctgggcgacaagggcaaaactcggtctcaagggaaaaaaaaaaaaaaaaaagaaagtcgttaagggcaacagctaggtttatggactgagagagccgattgcagggttcaggtcttagctaagataactttccgcctccctgtctgtggtggctgcaggagcctccctccctaatgttctgtggctggccactggtcttatttaccgcatcacatttacctccatctgaaaagttcttggttatttgtgtgctatgtctgccccctctctgactgtacactccataagggcagggatcacctctgcttgttcacgcctgtactccagtttgcctggcacatagtaggtgctcagtaaatattccttgaatgaatgaatgcatgagtgaccaacgccctagtctgttttcagagctcttagtccaaacccaggttcaacttggggtgccaccaatccttgcgggggggggtgcctggccccacccttgtgaattgggaggatctgggtcaggccgtctccctcttgggggctccagtgccccagccgatccgcggtccttgtccaacagcccagaggccgctgtccagcgggccaggaggcggatcactgcgtcggcgttgaaatttccactcgcgctccaccgcccttcccgcgggccccgagcgcgcgcctgggcgcgcgcatgcgccttcgcccccgcgccgcgcgccgctcctgtgcgcctgcgccgcgctcacgaccgccggcgcgcctgcgcactgctcgccgcccgtgggcccagccggcgcttgcgcggtggcacgggcgagtgggggggcgaggaggtggaggaggaggaggaggaggaggaggtggcggcgagaagatggcgacttcgaacaatccgcggaaattcagcgagaagatcgcgctgcacaatcagaagcaggcggaggagacggcggccttcgaggaggtcatgaaggacctgagcctgacgcgggccgcgcgggtaagggggctgcccgcgccgacccttcagggccggcggagggagggagggggcgcgtgtccggcgcgtgcacggggcggggtgggggggggcgcggcgggggcggggcgcgcgcggcgggggcggggcttggcacggcccgagggggacaggtgtccccacgccccgggcgtcgtgggcgggacaggtgaccccacaaaatccatacctgatggggtacaggtgccctgcatcactgctccccggaggagacaggggcctctatatcattactactaggagggaacaggtgctagtacctcgtcgttacctgacaggggacaggtgtccctacatcattgttacccgagggggacaggtgccccacattattactacctggaagggacaggtgcccccgcatcattgctacctgggggggcaggatgacacaggtgtatgagctgggtgctgcttgcaagcaccattggtagctgggggtgagggtgcaagtgcccccgcatccttgctacctgggagggacagatgccctcccattcttgctacctgagggggaccggtgtctctacgtcatggttacctgtgcctttactccctgggtgttgggggaggaacggatgtccccacttgcagagctgaggtgggacagggatctctccctcttggacagctgagggaatggtcagatcctgtcccccagggggtccagaggggggccaagaaggcagattgtgctcagtcctggaacttggagtggagacagctgccccttctccatgtagcccatatggtgggggccaggtgatgttcctcccagtggaacaggggatgctgaccacagcccctgccctctcaggaccagggtggagggccaggtctgcctcaggtggctgggcgcatttggtgtgcaggggcaggccaggttctgccaggctcctgtctggcagagcagataccctgcaaatctcacctgggaagttgctgtgggccaggagcaggggcttggggctggtgtctgagcacggcaaggcacccgagttcctcaggcctcagtttcttgtcaggcattctagcaagaccttcctcttggggcagggtggtgagcacactctgcaaaggtgatgctgaatctccactttgttcttgcagtgtggtgagacctctctcctgcatcctggggccttggggagggtttgggtgggctttgcagatgctcgtatccctggtttccagattcagccactgatgtgactggctcaggtagacttaacctcagtctctgattccttaggtagcactttcagtctgtgttactttgtaactagttgtttgtttctctgagagattgtgaccttatagactaggatttgtgtcttcatttctgtgttggtaatgattgggagctcactgtcacccaggtactgctttaggcatgctcggtgagtgtgccacatctgtcctcccagctccaagcagctacattcttgctcaggatgtagagaaagagatggctggtgaatgaatgaatgaaaaaaaaataagaaaatggccaggtgtggtggctcatgcctgtaatcccagcactttggaaggctgaggcagtggatcacctgaggttaggagttcgagaccagcctggccaacgtggtgaaaccctgtctgtactaaaaatataaaaattagccggacgtggtggtagctacctgtaatcccagctactggggaggttgaggtgggagaatcacttgaacctgggaggtggaggttgcagtgagccgagatcatgttactgtactccagcctgggtgacaagagtgaaactccatttcaaaaaaagaaaataagaagaaagtgtgcaacttgagcatccttccacgtgagtgtcccccacatatcagggcttctgaggcaggagtggccacttctttttgtctccagcacatggtgtgtgctggcatgcagttgttgtcaaatgtttgcagtgtgaccggaagaaaggggtcacagtaggttcatgggtgtcattctgattagaagtccagtttctgcgtgggattggaaatagattattgttgttgaaaacatctctttaaaataatagctttattgagatatgattcacacatcatacaatttacttgtttaaagtgtacagtttggtggtttttagtatattcacagagttgtgcaaccacccctattttgtaattccagaacattttttatccacccagaaagaaaccccgtccccattaacagtcactccccattccccctcccctagcccctggcaagcactaagctgtcttctgtctctgtgggttttcctattctgggcattttatataaatggaatcacacaacacgtggccttttgtgactggcatctttcactcagcgtcatgttttcaaggttcatctctgtagtatcatggatcagtgcttcgttcctttttagggtcaagtaatattccgttgtatggatatattgtatttgtttatccattcatcagtcaatgaatttagaaaaattctgaggccaagtgcagtggctcacacttgtaatcccagcactttgggaggccaaggtgagtggatgacctgaggtcaggagttcgagaccagcctggccaacatggtgaaacccgtctccactaaaaatacaaaaattagtcgggtgtggtggcacatgcctgtaatcccagctactcgggaggcttagacagaagaatcgcttgaacctgggaagtggaggttgcagtgagctgagattgtgtcactgtactccagccttggcaacagagtgagactccatctcaaaacaaaaacaaaaacaagattctgaagatatgcaggtggcagttctttcagccctggaaaccatttcccatcttcctcatcacctggggtcaggggagcatgggctctgggcagaggtgagttcacactagatttttagacacaaagcattgttctctttctggggcagggggtgattctgccccccaggggacacttggtgatgtctggagacattttgggtcatcatgattagggagtgcttctagcatctggtgggtggaggctgggatgctgcccaaccccctacatgtagtgcacaggatggccccatcgtgtggaataatctggccccagatgtcggcagtgccaagactgagaaacttttttttttttttttttttttgagatagactcttgctctgttgcccaggctggagtgcagtggcgcaatctcggctcactgcaacctctgcctcccgagttcaagtgattctccttcctcagcctcccgagtagctgggattacaggcatctgctaccatgcctggctaatttttgtatttgtagcagagatggggtttgtagtagagaccatgttggccagactggtctcgaactcctgacctcaggtgatccggccacctcggcctcccaaattgctgggattacaggcatgagccactgtgcccagccaaggctgagaaacttttgattagaggtgtaacagtgaggtgggccagggtgtgagctttgcacctggtcaggtagagttccatcctttgctcccacctatatggctgtgccatctctggcaggctgcgaccagggtgggcaagcttattcccagtttgactggccactgcacagtccaagtggcatgtccgccgtgcctggagcaggtgaatgaacctatatgatgtgggcttccctcctgcagccatggcgcgctgcctcccatactgtagacagcaggggtttggccacacctgcagccaggtgaggcatgatcgggtcggcacctgctcctctcctttgaattccaaaggacagcatgtcactcatgcgtgtctgttcacagttgccggtggtgatggcacctgaggtgtcttgctgccgtggaaggccagtcagcagatgtttggctagaagacagggacctcaccagggcacaagcactgaagggttgggggacagggcgtaaagtcgggagactgtttgcaggtcttggggcggaggggtgggtgtgtgggcgttccctcccactcttaggcttgggtcagcgtgacaggcaggctgtctatggcgctctgctgtgtgacactgggtgggtttctcaacccctctgggccgtagaatcctgagttgtaaagttggggcagcgcgttcattccatcaaatgacaattttcattgtctggcatgtctcaagagcctggggtgctggggctcctgcagtgtacagggcatacggggctgtgttcttggggagccagcatagttttaggggggacaggagagcatcaatgcatccgaatgaagcagacgccctcagaaggtggcacacgctgggagagaagtggctcagccacgtgctaggagtggctgggacaggggtgacacagcatccccagagagcagggaagagcacttcagattggggacaggcacagtcagagccttgtggtgggaatgacttggcgagtttgagaatgggtggaaagcagggaggagggcaggtgaggctgcaagagcttggatctcccctgagggaggggtctgggaagcctccctgcttgttttgtttgtttgtttgtttgtttgtttttttgaggaggagccccccctgtcgcccaggctggagtgtggtggtgcgatcttgactcactgcaacctccgcctcctgggttcaagcgattcttctgcctcagcctcccaagtagctggaattgcaggcatgcaccaccacgcctgagtaattttgtatttttagtagagacggggtttcaccatgttggtcaggctggtcttgaactcccgacctcaggtgatccgcccacctcggcctctcggaatgctgggattacaggtgtgagccacggcgcctggccccgcttgtttttgtaacagctttattgagatgtcatttccatggcattccgccactcagtggcttttagtatattcacatttgcacagccaacaccagtcaacttgagaacatttcgtacccccagaaagagaccctgtccccatcaacagttacttcccactcccccttgcccagcccctggcagccacaaatctgctttggttgcttgctttctttttttttggagacagagtctcagctctgtcacccagtctggagtgcagtggcacaatctcagctcactacaacctctgcctcccggattccagtgattctcctgcctcagcctcctgagtggctgggattacaggcaggtgccaccacacccggctaatttttgtatttttgagtagagacagggttttgccatgttgggcaggctggtctcgaactcctgacctcaagtgattcacccgccttggcctcccaaagtgctgcgattgcaggtgtgagccaccacacctggtcaactaatgtggtttctgtctctatggatttgcctgttctggacatttcatatcaatagaatcctacacagtgaggcgaatcctgcaccatgaagccttttgtgtctgccttcttttacttagcatagtgacttcaagcctctaacttggatcagtgcttcatttctttctttcttttctttttctttcttttttttttttttgagacagagtcttgctctgtctctcaggctggagtgcagtgagccaagattacgccactgcactccagcctgggcgacagagtgagactccatctcaaaaaaaaaaattgatggccatatatatatatatatatatatgtaatataacacttaccattttgacgttttttaagtataaaattcagtggcattaagtttattcccagtgtggtgcaccgtcaccggcatggctcagtaatagttcatgtcatattccatggtgtgggtctaccccgttttgtccattcatctggccatgaacacgggttgtttccacctttggctgtcgtgaatcatgctgctgttggcatctttgtccacgtttttgggtggatgtatatcttcatttctcagagcatgtgctggggagtagagttgccgggtcctctggtaactctccatttatccatttgaggacgtcgtgtgtctcaggaggatagctgtggctgtgagtgggatgggtgtggtgtgagcatccgctgcaggtgtccagatcagggggaatgatagctggagcaagggggtgacagagcgggtggatttggtggcatttctgcagcagagccacccagacgtgctggaggattggatgttgggggtgaggggaagggaaggggggagtgtcgtctgcttgccaggggttcaggacattggggattcctcgtatgactgatcattgatgacctcagacagcaacacctgggccagaaaaagtacccaggcaagacagtcatggtggcacggtcagggctgaaggagggcactctcctgctgttacctactgtgaagctggagtaaaacgggcccctgggctgcaggcacagcgcagtggtggctcaggttagctgagtgtggagcccgccccccagtcctggctttggcgctatttgtttctgtgccggctgcttcagctgtctgctgccatccgcagcctccatatacaggcaggactccctgagctgctccctgaacaaaaggtggggcaagctgccctcatcctcatcactctccaggcccctccaaaaagctaagctgtctcagtactccccaggttgtgagctgcatgccctgcagcaggctgagtggtggcccctaaaaagcatctgctcaccttctagccctgtaacccgtgaattggaccttagttggaaaaaaggtttctgtagatgtgattaaggtaaggatctggagatgagatcatcctgggggggtggccctaaatccggtgactggtatccttatgaagagtgggccatggctgggcgcagtggctcactcctataatcccagcactttgggaggccggggtgggcagatcacgaggtcaggagatcgagaccatcctggctaacatggtgaagccccgtctctactaaaaatacaaaaaaattagctgggcgtggtggtgagcgcctgtagtcccagctactcgggaggctgaggcaggagaatggcgtgaacctgggaggcagagcttgcagtgagccgagatcacgccactacgctcgagcatggatgacagagcgagactccgtctcaaaaaaaaaaaaaaaaaaaaagaagagtgggctgggagtggcgatgcatgcctttaatcccagagttttcagaggccgaggcaggaggattgtttgagcccaggagtttgaggttacagtgaattataatcactccagcctgggtgacagagtgagatcctgtctcaaaaaaaaaaaaaagaaaaagaaaaaggaaaagatggagggggaccaggcacagtggctcacgcctgtaatcccaacattttgagaggctgagatgggacgataacttgaagccaggagtttgagaccagcctgggccacaaagagggaactcatctctacgaaaaaaaattgttttttaattagccgggtgtggtggcgtgcacctgtagtcccagccacttgggagggtgaagtgggaggatcacttgagcccaagagttaaggctgtggtgagccatgattgtaccattgcactccagctggggtaaaagagtgagacccttttctccaaaaaaaaaaaaaaaaaaaaaagacaagaaaggacacagagacacaggggagaggaccatgtgacaatggaggcagagattggagcgatgtggtcacaagtcaaggaatgcccagagcccccagaagctggaagggataggaagggtcttcccctagagcctctggaggaagcatgggcctgccggtgcctcttttttttgttttttttgagatggagtctcactctgtcgcccatgttggagtgcagtggcgtgatctcggctcactgcaacctccttctcccgtgttcaagcgatcctcctgcctcagcctcccgagtaactgggattacaggctcctgccaccacgcctgggtaatttttgtattttcagtagagatggggttcatcctattggccaggccgatctcgaactcctggcctcaaatgatccacctgcctcggcctcccaatgtgctgggattacaggtgtgagccaccgcgctcggtcttccccacccccactcttaggacacaatccatacccgaacactgagctcctacactccaaccccgaccctgtggtcctgatcctccaccccaggccctgctcttgctgtctccctctgtctcatccagtgtagagcaagggcccctgctactaaaaagggctgaatgaagggtccactccgggcctcggtggtaaccccacacaaaacctgcggagccagctggagctggctggacttatgcatctgcaagcggctgcagccctgtcctgatgtgaagtccacaaggttacctggtgctacaggttctgtcaggcccggggttccttgccactggctaaagtcacaaattaccacaaagtgaggggcatgaaaaacagaaattaattccctcaccgtcatcaatatgatgaaaccccgtctctactaaaaatacaaaaattagctgggcatggtggcatgcacctgtaatcccagctactcaggaggctgagacaggagaattgcttgaacttgggaggtggaggttgctgtgagcagagatcatgccattgcactccagcctgggcaacaagagtgaaactctgtctcaaaaaaaaaaaaaaaagaagtggttagggtgtgcagcgaccaggtccacgtgctctggggaatctgggagggcttcctggaccctcagcgtgtgtgaaaccaggggctgcagggctgggtgaggagcagatgtccctggctcaggaacaggcatggcacttgtggctctgcagttagaaattcatttttctgggccgggcacggtggctcacgcctgtaatcccagcactttgggaggccgaggcaggcggatcacaaggtcaggagatagagactatcctggctaacatggtgaaaccctgtctctactaaaaatacaaaaaattagctgggcatggtggcacgtgcctgtagtcccagctactcgggaggctgagacaggagaatcgcttgaacctgggaggtggaggttgcagtgagccaagatagtgccactgtactccagcctgggcgacagagcgagactccgtctcaaaaaaaaaaaaaaaaaaaagaaattcatttttcggccgggtatggtagctcacacctgtaatcctagtattttgggaggccgaggtgggcagatcacgaggtcaagagatcgagaccaccctgggcaacatagtgaaactctgtctttactaaaaatacaaaaattagccaggtgtggtggtgtgcacctgtagtcccagctacttgggagggtgaggcaagagaattgcttgaaccagggtgctggaggttgcagtgagccgagattgtgccactgcactccagcctgggtgacagagtgagacaccgtctaaaaaaaaaaaaattcatttttcatggcttgccagcacctaccaccaaatgtgcaatcaagacaggttttaccaaggagcttaactcttttgtttttgttttttttttttttgaaacagagtttctctctgtcgcccaggctagagtgcagcggtgtgatctcagctcactgcaagctccgcctcctgggttcacgcccttctcctgcctcagcctcctgagtagctggggctacaggcgtccaccaccatgcccggctacttttttttgtatttttagtagagacagggtttccccatgttcgccaggatggtcttgatctgatctcgtgatccacccgccttggcctcccaaagtgctgggattacaggcgtgagccaccattcccggcccgcttaactcttactgtttgcaggcacactgatgtactctgttttgttctaatatgaaaattagcctgggctgggtgggcacagtggctcacacctgtcatcccagagctttgggaggccaaggcaggtggaccacctgaggtcaggagttcgagccagcctggccaacatggtgaaaccctgtctctactaaaatacaaaaattagctgggcatggtggcgggcacctgtaaccccagctattctggtggctgaggaaggagaatcgcttgaacctgaaaggtggaggttgcagtgagctgagattgcaccactgcactccccagcctgggtaacagagcgagactccgtctcagaaaaaaaaaaaaaaaaataggctggcatggtggctcatgcctgtggtcccagctacttgggaggctgaggcgagaggttcccttgagcctaggagcttgaggctgcagtgaactatgatcacgccacttcactccagcctggccgacagagagactccatctcaaaaaaaaaaaaaaaaaaagaagaagagacgaagaaaaaaataaaaagtaccagttgggacccactgaattgataacttactaatccagagctctgtaagctacgtctctttattttattagaacatgggcacaaccatttattccttttttgtggctgcttttgtgggacatcagcatagtcccatgcaacagagatcatgcggtccactgtggctttgacctcctgggctctagcgatcctcccacctcagccccctgagtagctgggaccacaggtgttagccaccatgcccggctaatttttttattttttgtagagacagggtcttctccctgtgttgtccaggctggtctcaaactcctgtgctcaagcaattgtcccatcttggcctcccagagtgttgggattacaggtgtgagtcactgcgccaggcgcatctggcccttcacagaagggattggctggcctctgggactcacacacagtttgaaacccactgacctcaagtgttaaggaagatcagctgcaggggctgggggtggttagcaaggagagtgaggttggcggcagttctcccactttcagcgacctctttttttttttttttgagagagggagtcttgctcctataagatcttggctcactgcaacctctgcctcctgggttcaagtgattctcctgcctcagcctctcaagtagcggagactataggcacgcgccaccatgcccagccaatttttgtatttttagtagagatgaggtttcaccatgttggccaggctgctctccaactcctgacatcaagtgatctgcccgcctcggcctcctaaagtgctgggatcacaggcatgagccaatgtgcccagctaatttttgtacttttggtggagttgggggtttcgccatgtttgccaggccggtctcgaactcctggtctcgagacctgcccgccttcgcctctcaaagtgctgggattacagatgtgagccactgcgcccggcctggggatttctttttttaaatgggactctgtaaaatgccatatggacagcacaagtggggtctgccctgggtagagactggcctgaacccagggtcagggaaacatcaaaatccacaggttattccgtgcagagtagggggctcacttggggccgattctgcccctgggggcatttggcaacttttggggacatttgtggttgtcacgacggggaatggggtgctactggcatccagtgggcagagactgaggatactggtcaacactacagtacacacggccgggtgtggtggctcacgcttgtaatcccagcactctgggaggctgagacaggcagatcacgaggtcaggagatcgagaccatcctggctaacacagtgaaaccccgtctctactaaaaatacggaaaattggctgggcgtggtggtgggcgcctgtggtcccagctactcgggagggtgaggcaggagaatggcgtgaacccgggaggcagagcttgcggtgagccgagatcgcgtcactgcgctccagcctgggcgacagagtgagacttcatctcaaaaacaaacaaacaaacaaacaaaaacactacagtacacaggatggcccccaccacagggaattatccagccctaagtgtcagcagtgtcacagtccagaagccctggtgtcaggccctgtgtgtgccgggagcatgcaggtgcagaggggtgggtggaggctactggctacatgagatgcaaacctggatcctgtagtacatgactgctctgggcagctggtggcgtcctcccgggtttacagagtgggagacaggcccggagagcgaatgtcatagagcgctagagtggagaggctgccatctgacccaggttggactaaccccgcagcctgtgtgtttttgccgtgtcacggagttctgggagttggccggctggtcagggtgaggcagggcggttcaggctgctggaagcctgtgtgccgaggaaggggccctcagagcaggtacgacagtgggtggagggcctggagccaggccctgccatgtggagccatggaaggttctagtgggatggcaatgtgagtgacagtgggggtccagggagtggcaggaactggccttgctagaatccatgtatttgtgcacagtggattgttgcagtaactcatgagaaagggcctgttgcctgcccccatggcacagatgagaaattgaggcacaggaggtcacatggctgacggtgggaggaggagctgggacttgaacctgtgtctgactccaaggcccatgcggaggaccttgttgtacgctgagcctcagttcatgttcatctgttgagaagcatagaggttgtccctggtttttctcaacctaaacattctttgtgtttgtcccagtgcatgtactgggggagtggggacctctccaaggtgcctgcctgggaatggccccacctgtgtgtccctgagccccctccagtagggaggagggcgagcagctggaggtgtgccactcacggaggaagactcggggcatttaggaggtgatggtgacagggattattgggagggcgggtgggggagtcccaggctgcagcgtgggaaccagaatcacaggggaggggtggggggtaggagagtcctgcttcaccttggagctcatgggatagaacacacccccactttatttctggttggggtatgtctctgacctccaacaggtcctgcgtggcccctgggtggaggtgggtgccctgttcttctgggtgtggctgtggtgccagcagctggatgggggtccaggtgtgtaaataaggaagtgccgcgtgcctcgagggccagggatgcccgagagccaatgtttattatttgccaactggaaacgaagcatggccggggcctcctccttggggttcttgcacggagggattcagaagcacttggcaccggggggagcagcctcatcggtgtccagccagggccacacagtcagcctcagcccccacctcgcttccttctgggcgagcttagacctgggaggcctctttttttttggagtgccgtggtgcgatctcagctcagcaacctctgcctctcgtgttcaagcgattgtcctgcctcagcctcctgaatagctgggattacaagcgtgcaccgccatacctggctaatttttgcatttttggtagagatggggtttcaccatgttggccaggctggtctccaacttctgacctcaagtaattctccctccttggcctcccaaaatgctgggattacaggcatgagccaatgctcttggcccaacctgggaggccctgctgtctttggtgcatggtgcagtaggggtcacagtggtctctgcctcattggatcatggtgagacgtgaatgtgaaggcatctggtgtatctggaatggggcctggcatagatactcactgtgtgctcactgctgccaagatgctggaggtgtggctactgtggacacatggtgtacccagttggcactgggcaggcatttggcaggcatccaacaggtgcttgatggggacacagcaggcctgcaagaggcacttcgtgcccacacaaggaaatatttagcagatgttcagtaggtgcccagtagatgctcagcaggcacacagtgtgtactcagctggtgttcaacaggctaatggtatgtactcagctggtgctcagcaggcttacagtgtgtgttctgcaggtgctcagcaggtgcacggtgtgttctgcagtgtgtactcagcaggtgctcggcaggcacacggtaggtgctctgcaggtgcacagtttgtgttctgcaggcgctcagctggcgcagcatgtactcagcaggcgctcagcaggcactcagcaggcacacagtgtatactcagcaagtgcttagtaggtgcacagtgtgtactcagcaggcactcagcaggcacagtgtgtactcagcaagtgcttagtaggtgcacagtgtgtactcagcaggcgctcagcaggcacagtgtgtactcagcaagtgcttagcaggtgcacagtgtgtactcagcaggtgcttagcaggcacacagtttgtactcagcaggcgctcagcaggcacacacaacagtgtgtactcagcaagtgcttagcaggtgcacagtgtgtactcagcaggcactcagcaggcacagtgtgtactcagcaggcgctcagcaggcgctcagcaggcacagtgtgtactcagcaggcactcagcaggtgcacagtgtgtactcagcaggcgcacagtgtatactcaccgggcgctcagcaggcgcagtgtgtgctcagcaggtgctcagcagatgcgcagtgtgtactcatcaggttctcagcacatgcacagtgtgtactaagcaggtgctcagcaagtgcagtgtgtacttagcaggcacttagcaggcgcacagtgtgtattccacaggtgcacaatgtgtatacaggtgctcagcaggcgtacagtgttcagcaggcacacggtgtgtattcagcaggtgcacagtgtgtatttggttgctgagcaagtgcacactgtgtactcagtaggcgcagtgtgtgctctgcgggcactcagcaggtgcacagtgtgtatttagcaggcgctcagcaggtgcataatgtgtatttagcaggtactcagcaggcgtaccgtgtgtgctctgcaggcgcttagcaggtgcacagtgtgtatttagcaggcactcagctgacacacagtgtgtatttagcaggcgctcagcaggcacagtgtgaactcagcaggtgctcagcaggcatcagcaggctctggaatctgacctccctgtgggcaggcctgtctccagttcattctggaatctcatagaagcaggtgctctctaagagggccagtaccatgtcacatggtccaatgtccccacttcagtcctgggaggggtgtgcggggtcttctcaatacctccatctgggaacatgtaccggctgttgaggggccctgaagtgagaagagtagtttgtggtcttcctggagctcacatttttctaagcaaatcctgagcctgtatacttgtacggaacacagtgtgttccagggtcaaatcctcggggtaggatggccctggggctgcatgatggtgcccacccagccctctgagtgcctgaacaagaagcactggggtggcccggtgagttctccctgcagcagtgagggtttggataggaaagtccattcctcgagtcagttggtatttcctgagcatctcctgtgagctggccccggagacaccttggagagcaggtcagctggagaccctgccctagggagtgacaggaagccacacctgtgccagctggccctgcccctgaggttgcggctctgagccaaagcgaagagcctggcctcgcctggctctgggggtgatgcctcgtgggccagggtgaggggttgagatctggtcctgggatggggagggttttgagcagggcagtgatgtgggatttatgctttgcaaggatcccattggctgccatgtggggacaggcctgggaggaacgagtagggagcagcaggaggcctaggaggggccagggcaggtgtcccccggagatagtgggtgctggggctctgtgatgacctggggcttggcaaaggcgggcttgtgacagactgagcctcatctcggcagctctcacacccatggatcctgagcctgattccccaggagggttggcgacgggagggttatgttaagtggctgcgtcttccatctcagggagccccacactggggaacgtcaccactatagcggctgagaggctttgggtcctcatttactacataaaattcccccttctctgtacttgggtcctgacgcctccgctggtcccaggagtttcactccgtggggtggggttgaagggtgcggtgaggcccagaggggctgagtctgcttggaagggtgggccttctcccactgcgggtgctaataccctgtgcccatatcctagccaccctgtcccttatccacataccccactctggtatttcaacagcccagagaccaccacggtgcttgggggctctcggcaagggggcgaagcctccctgagaacttctgcaggccgcccttctcttccctttcctgccggggctcttgctgcagagaagctctctgccacacttttttttttttaaataaaaaaaatgaaaataaagaaatcatttatgtttcaaaactttgattaaaattgaaaacagaaacaccacagcacttcccgtttcctctgcatctggcaccactcacctgggtgcagagggtgggtgggtgcatgccagctggtcattcgcccggaaatctctgggaggaagtatcagcacagcctagcagggcgcctgggactggctctgtgggctggccgtccctctggctggggacacggggaggccgagcgtgtccgcaaagacacgcgagctgtccacctttctgggctgcaggggtctgcagaacctcggaacctcggaggggctctctgtctgcttcagcgtctctttctcaagtgactgaaagcagaggctccctgctgcgttacaccattgagtcctttcgcatctgtgcgcatcccgcttccatcgctgcggggatcccttcggtcctcccaggcaggcgagattggtggctgtaattaggacaggagtggctcattatatcatcacagaataaatgcacagaccctggggatgatttatggtcccaacagcctatctttgcgcccaggcggcctcggcctctgttcggcaaggagcccgctaatcccttcactgccggctcagccggggcagaaggaggagcctgaaggtccaccatggggtggaggctgcctgctcgcgggcccgcccccagagcccggggctcatcacgctgctctatgcgcctctgttggctcctgccaaacagtccctcccttctgtgcctcagtttcctggctgtaaaaagggggtgctcacagagcccccttgaggagtcgtcacatggattagatgatgcatccacgcaaagtgtctggccccgtgcccggcccgtggtgggtgcacaccttgaaagatgcctgcttggccgaggccagctgttgagctgctacttggggcaacagtgagagcaggatcgcaccttgttcacctctgtgccttggcccagaatatgacagctgccactgtgtggcttatgggtcatctgtttagtttcacctgagggagtattcattgctgttaactgtttcttatgagataggatttttgttttttgttttttgagacagaatctcactctgtcacccaggctggagtgcaatggcgccatctcagctcactgcaacgtccacctcctgggttcaagcgattctcctacctcagcctcctgagtagctgggattacaggcgtgtgtcaccaggcccagctaatgttttttattttttttgtatttttagtagagacggggtttcaccatgttggtcgggcaggtctccaactcctgatctcaaatgatccgcccaccttggcctcccaaagtgctgggattataggcatgagccaccgcgcccaccgttttgttttttttttttttttttgagacggagtttcactcttgttgcccaggctggaatacagtggtgcaatctcggctcaccgcaacctcctcctcccgggttcaagcaattctcctgtctcagcctcccgagtagctgggattataggcgtgtaccaccacacccggctaattttgtattgttaatagagatggggtttctccatgttggtcaggctggtcttgaactcccgacctcaggtgatttgcccgcctcagcctcccaaagtgctggcattacaggcgtgagccactgtgcccagcatttttttttttttttgagacaaggtctggctctgttgcccaggctggactgcagtggtgtgatcttggctcactgtagcctcaatttcctgggctcaggcagtcctcctgcctcagccgcctgagtagctgagaccataggtgtgtaccaccacagctggctaatttttagtatatattttttgtagagacaggagtctccctgtgttgcctacgctggtctcaaactcctgggctcaagtgatcctcctcctgcctgggcctcccaaagtgctggcttgagccccatacctggcttcttaggggatagtctttttttttttttttttgagatggattttcgctcttgttgctcaggctggagtgcaatggcacaatcttgcctcaccgcaacctccacctcccgggttcaagcgattctcctgccctcagcctcccgagtagctgggatttcaggtatgcgccaccacacccggctaattttgtatttttagtagaggcagggtttctccatgttggtcaggctggtctcgaattcccaacctcaggtgatccacctgcctcggccccccaaagtgctgggattacacaggagatagtctcttagactttgtgaaaagttttggagatagtgcagggaatacccataaccccccacctgtttcccacattgtgaacatcacacgtgacctggttgcgacggccgggctgggacctccagttgtcacagttcttttttttttgagatggagtctcgctctcgctctgttgcctcaatttcctgggctcaggcagtcctcctgcctcagcctcctgaatagctgagactcggctcactgtaagctccacctcctgggttcacgccattctcctgcctcagcctcccgagtagctgggactacaggcgcctgccaccacgcccggctaatttttttgtgtgtatttttagtagagatggggtttcaccttgttagccaggacggtctcggtcaggatagagacggggtttcactgtgttagccaggatggtctcaatctcctgacctcgtgatctgcccaccttggcctcccaaagtgctgggattacaggcgtgagccaccgctcctggcccagttgtcacaattctattaactagactccagactgtgtttggatttccccggattgctcctttaagcaccttctctggacagggttgtgtgttgcatttatttacttacgtatttatttatgcatttatttatttatttatttatgatagagtcttgttctgtcgcctaggctggagtgcagtggcacgatctcagctcactgcaagcaacctccacctcccaggttcaagcgattctggtgtcttagcctcccaagtagctgagattataggcatgcaccaccatgcccggctaatttttgcgtttttagtagagatggtgtttcgctgtgttgaccaggctggtcttgaactgctgacctcagatgattcgcttgccttggcctcccaaagtgctaggattataggtttgagccaccgtgcctggctaatttttgcatttttagtagagatggggtttcactatgttggccaggctggtctcgaactcctgaccccaagttatctgcctgccttggcctcccaaaatgctgggattgcaggcgagagccactgcgcctggcaacgtgttgcatttagtcaaagcatctcctttgattcctccaatctgtgatggttcctcaatgtctcctcatcatccgtgaccttcactctcttgaggagagctggtcaggtgttttgtggaatgtccttattgtggtcttgtggaggttttctggcaattggactgaggttgtgggattttggtggggatcccacagaagtgaagtgctcgttttctttttatattttttctttttttatatttaaaatagggatctgcctgtgttgcccaggttggagtgcagtgctcactgcagccaggaattcctgggctcaagcaatctttccacctcagcctttcaagtagctgggactacaccatcatgcctggctttgttttaaaattcttttgtagagacgggggtcttgccatgttgcccaggctcaagtgatccaccctccttggtctcccaaagtgctaggattacaggcgtgagtcaccatgcccagcctttttcttttttttaaagttagtaaaatacacataacatgtggccagatgcggtagctcttgtctgtaagcccagcactttgggagactgaagcaggtggatcacctgaggtgaggagttcgagaccagtctagtcaacatgttgaaaccccgtctctattaaaaatacaaaaattagctgggtgtggtggcaggcgcctgtaatcccagctactcgggatgctgaggcaggagaatcgcttgaaccctggaggcagaggttgcagtgagccatgatcgcaccactgcactgcagcctgggcaacagaacaagaccctgtctcaaaaacaaaccaaaaacaaaacaaatacacataacgtgtaagttactgtcttaaccttaagtgtgcagttcagtggcatttagtaagtatcctcacattgttttgcaatcatcaccaccatctgtgttcagagcttttgcatcttcccgcacagaaactctgtccccattaaacactcacccacccaccccctaccccccaatccccaacccccaccctcctactaccctccattccctcccagcccctggcaaccaccatcctattttccacctctatgagtttgacgactccagggacctcatgtaaggagaatcatccaggatttatcattttgtgtctggcttatttcactgagcataatgtcctcaaggttcgtccacgttgtaacgtgtcagaacgtccttcccctctaaggctgttattccactgtatggatgggacacattttgtttatccgttcatctgttgatggacatttggctggtttcaccatttggctattgtgcgtagtgctgctgtgaacattggtgtacatctctttgagtccctactcataatttttttgggtatattcccagacatgggattgctggatcatgtgtaattgtatgtttaattttttttgagacagagttttgctctaccacccatgctggagtgcagtggcgtgatctcggctcaccacatcctctgcctcctgggttcaagcggttctgcctcagcctcccgagtagctggaattacaggcgcatgccaccacacctggctaatctttgtgtttttaatggagatgggggtttcaccatgttcgccaggctggtctcgaactcctgacctcagatgatccacctgccttggcctcccaaagtgctgggattacaggcgtgaaccaccacgcccagccagcatgtttaattttttgaggaactgccacactgttctctgtagtggctataccattttatgttcctaccaacagtgtataaggatttcagtttctccatatcctcaataacacttgttattttctgattttttgataatagccatcctaatgtctactaatatttactaatcctaatattttttttttgcaaaaaatgatattttgatagggattgtggttttggtttgcatttccctaatgattagtgatgttgagcatcttttcatgtgcttcttggccatttgtctgtctttggagaaatgtttattcaagtcctgtgcccttttccttttcctctctctctctctttttttttttttttaatgctttttagtatattcatactttatctattttaaattgggttgtttttctttttgcacttggagatcctgttttcccagagctatttgttgaaaagaccatccttttcccattgagtagtttggcacccttgttgaaaatcacttgaccatatatgtgacagtttatttctgggctttctattctattccattggtctttttttttttttttttttttttttttttttttttttttttagacagagtcttgctctgtctctcaggctggagtgcagtggtgcaatcttggctcactgcaacctcctcctcccgggttcaaagcgattctcctgccttagcctcttgagtagctgggattacaggtgcccatcaccacactcagctaatttttgtatttttagtagagatggggtttcaccatgttggccaggctagtcttgaactcttgacctcagatgatcccccccgccttggcctcccgaagtgttgggattataggcgtgagccaccacatctggccccattggtctttatgtttctctttatgccagtatcacactcttttgattactgtagctttgtagttaagttttgagatcaagaagtgtgagtcttccaattttgttattctttttcaatattgtcttggctatttgaggttttttgagattctgtatggattttagggtggatttttttctatttctgcgaaaaaggatattttgatagggattgtggttttggtttgcatttccctaatgattagtgctgttgagcatcttttcatgtgcttattggccatttgtctttggagaaatgtttattcaagtcctttgcccttgttttttagcgctttttagtacattcacattttgactatttttaaattgggttgtttttctttttgttggtgggttgtaagagttctttatatagtctacatattgatcccttatcatctatatgattcgcaaatattttctctcattccgtgggaatggggccttttcactctgttgattacgtcttttgatgcacaagtgtttttaattttggcagcatccaatttatgtattttttcttttgttgcctgtgcttttggtgtccgatccaagaaattattgccaactccagtgtatgaagcttttcctctgttttcttccaagagttttatagttttagtatatatagttttagcttttatggttttagttatagagttacagttttagttttttacttttatagttttagctttagatctttgatccgtcttgagttaatttttgtatatggtgttagatcagggcacagcttcattcttttgcatatggagatcttgtttttccagagccgttttgttgaaaagactgtcccttccccgttgaatggtttggcacccttgttgaaaatcacttgaccatatatgtgagggtttatttctgggcttttattctattccattggtcttgatgtttgtctttatgtcagtaccacactgttttgattactgtagctttgtagttaagttttgaaataacaaagtgtgagtcctccaattttgttatttttcaagattgtcttgtctatttcagattccttgagatcccatatggattttagggtggatttttttctatttcttcaggaaatggtattttggtagggattgcattgaatctagactgttttgggtagtattgccacctctgaaatattaagttgtggccgggcacagtggttcacgcctgtaatcccaccactttgggaggccaaggcaggaggatcacttgagcccaggagttcaagaccaggcagagcaacgtagtcagatcctgtctctatttaaaacaacaacaacaaaaagaagtcacactctcctcctcccagctatgtgaccctgggcaagcccataattggcccctgcctcagtttccccatctgtaagatgtgccatgaagggggctaactctgtcaatgcatgaacagtcctcaggactgtagcttgcacaggtagtgctccatgaaggcagccatgtctcctgggagggctgcctggaggaggagagctctgcagtgggacattaggggtgaggtccgagttgccggtgcaagaggtgggtagggaagggaaggctctttgggtggaggagaaacagcatatatggggcccagaggcctacaggaggcagggaaggaggaaggagagaggagacccagatctggaaaggcccaagagccaagctggagagcttggacgtgatcccacagccagctatggggtggggaggggtgacccaggatcagctttgagctttaagaaaggctagagaaaaggtggtggggttggagaggagaacagggaagggagttgtgggttctggaggggctcaggaactgcagaggagaggtgaacccagggtgcccgagagaggaacggggccaccccgggtttctggcttctgtatcagcatcaggaagatcatggcactgtctgccagggccaggtgaattgggcacgttggctgggggaatcgggaccatgacgagcctggtgaggggctgctgggctggaggagtctcctggggcatcacagggaatgttctggaagcagggctggggcggcacttgggagttagctgacagtaaggagtgacgtgagaaacacagaggccaagtcctcggggagccaagtttgagaggcagacggagcgtggggaccgaggtcagggctcctgtggggccggcctggcccttcccttcccaccgccgttcgggaccctgtggtatcttccgtgggcactggccctgctcccagctgagcggtgcccagaagcaggaggaccctggtttcctgcccctactcagccaccctgcccacgccgtggcaagcccagagctgtgctcagttcaggcagccgtgtggccaccctggtgactcctccctgccgctccctgctgtcctgtcctccgtggggtgctgtctctaggcccgggaggaaggctgaggggaaggcctcatgggtgcagtgggtaaatgtccacccggtacctcctctgagcccgcatggtgctcggaggtgcagggtcccagggctgtttctggagcagcaggtgccaggcatggcatgggaggggccttgtggagcccagagtcgcaggtgcacctggcagtgggcagagcagctgcagaggcttggtgttggcagggtgcacatgaggaggtggtagccaaggggacagggcctcccagcctggtgcccgcagcctccctcacacagggaccacctttcccctcacctggcccctcatcctctgtcctgatgtcccctcatggtgcctttttatgcccaccttgcccccacacgtaaccctcaggcagtgggagaagggctgcagcaggggggtgtggctcctggtgcaggggacaggccaggtggcaggagccaggacagcttcagagggagaagcctccaggcccaaaatggggcctagacaggaaggagggagcgggcaggttaagaagggcagtatctgcatggggctgagagggagcagagagggcatctgagggtggctgggggctgtgtctgagcaaggccatggatgggagttgggatgagcctctgtacctgcggacacccctgctgaggtcctctgggaagccggcagtgcacctaggactccacctgggggagatgggtcccgtctgccctgggcgggcttcctcatgctgggaccccagcctggaacgcagccaggatcaggagccctaaagttaggacctgagggctccgagggctgaggccggggacagctgcctggcgttccctgccgtggatgggctgctgctcccatgttgcctgccctgccctggcccatcagtcctgcctcctccagcagcggtgactttgccacagggaggacagctcaggtcactcctggttaaatccttccagcggcttctcgtcccacccaggatggggtcccacaaagctcagctctcttgaggctctgagcccagcacccgcccccccacacttctttgcccaccctggcttccttggcgagccactgtcatggtcactctgtgaccccagggcctttgtgctcacggggcctcctgcctggagtgctcttcccagctccagcgtcacctccttggccaccttccccccaccccatttccagcttgttttctgcacagccccactcactcggaagtctcccacttccttcctccatctacccacccagctgcccggcccatgcccatctgagccagcacagcttgtcctgggccagcaaggacttgtggcttcccctgctgtggactccccgttcctcgacgtccctccctggcctcccgtcctactgcctgggggcagtgtctggccagcagatccttcttgaaagggaccatccctctgggtgagctggacatgcagggttttctggggctgctggagggggtgggagccaggagccagtgtgagtcggcggccggccgggctcctggctgtgttgagctgttccctcccatgggggctttgggtcagagggtagcgagggtcacactctcaggcacccttgactgtttattttttacatttattttttatttattatttatttattttttgagacagagtctcactctttcacccaagctggagtgcaatggcttgatctcggctcactgcaacctccgcctcctgggttcaagtgattctcctgcctcagcctccccagtagctgggattacaggcacccgccactgtgcccggctaatttttgtattttagtagagatggggtttgggttttgccatgttgcccaggctggtctcgaactcctgacctcaagcgatccacagccttggcctcccaaagtgctgggattacaggtgtgaaccaccgcgcccggcctcacccttgactgtttaggaagcccatgcccaggcttggccagtcacccctctttcttcaccctgtcccaccccacagtgccccctccccagggctttgtaggcctccagctgatggggagtctgctgtggccagggctgctaacagttaactgctggatgagctgcagtaaatttccttggggttttggctcagggtgagacccgcattcccagctttgcttggccacatgcggcatcctagcactgaaccttcccgtcccaggtggcctgcttctcggggaggggcctgggaggacttcttgtttgggagtcggggagccatccttccctccaggccttgggtcagctcagcccacacagctgctgacccagagtgaggggcagtgggacgcgttggccttggcggccccggggccgctttgaaggggagcatgagggcaccgatcctgcgcctctgtgcctgggccgggcgggagctggggatgcatccatcgcctgccaggaatccgggccctgagttgtcggcacttccagcgtttcaggagaagccaagcaattctgatgtttaagttaacttaaaagaaaaaaaaagtaaaagttggccaccagtttgcatttttaaaaaaatgcttctcagacctcaggaaggccacagctgcggccggccacgctcctgctcctgcctgccaggttacaggctctgacgtgggcctgagggcctctgggctgtagtgggtggggcggccgtgctggtcctggggtgggtgccgggcagttccgcccattcccggctgcgttgggagggggtgtgtgatagccaagaagcttgatgccaagggtcttggatcagcagctgacgtcctcttccttatacacatgtgggaccgtggtggcttcctggttagatggcactagggtggtctactttgggcccctccacccacccccacactgccagaaccttgggtatactttttatttctcctttatacttttttcactgagataaaacacatataacataaaaattagcctttatttaattttttgagacagggtcttgctctgttgcccaggctggagtgcagtagttctatcccagcagcctcaacatccaggctcaagtgatcctatcacctcagcctcccaagtagctgggattacaggcgtgtgccaccatggccagctaatttttaaaatttttttgtggagatgggtctcactatattgcccaggctggtctgaaactccttcctgggctcaagccgtcctcctgcctcagcctcccaaagtgctggaattagaagcatgagccactgtgcctggcccagttagacgtttgtttgtttgtttgtttttgagacaggagctcactccgttgcccaggctggagttcagtggcatgatgttggttcactgtagcctccacctcccgggtttaagtgattctcccacctcagccttcctggtagtgagattacaggcgcccaccaccacacccagctaatttttttgtatttttagtagagatagggtttcaccatgttggccaggctggtctagaactcctgacctcaggtaatccgcctgccgtggcctcccaaagtgctgggattataggcatgagccaccatacccagccctaattagccatgttaaagtgtgcaatttagtggcatttagtaccttctcaatattgtacagtgaacacctctgcctggctccagaacatttcatcctcccaaaaagagaatccccttagccgggtgcagttgcccattcctataatcccaacgctttgggaggccaaggcgggcagatcgctcgaggtcaggagtttgagaccagcctggccaacatggcaaaactctgtctctactaaaaatacaaaaattagctgggcatggtggcatacggctgtaatcccagctacctgggaggctgaggcaggagaatggcttgaacccgggaggtagaggctacagtgagccgagatcgtgccactgcactccaggctgggtgacggagcaagactgtctcaaaaaaaaaaaaaaagaccccaccccctatccccatcagcagttactccccgttcccctccccagcccctggcagccagcagtctgcttcctgtctctatggatttgcctgttctggacatttcagatcaatggaatctcacactatgtggcgttttgtgtctggcctctctcactcagcatcgtgtcttcaggcttcttccacgtcgtagcatggatgagtgcctcattcctttccatggctgaatagcattctgctgtatggatggagcacatctggctgaagcacattctgctgtatggatggagcacattctgttcagccacttgtctgttgatgggcatttggcctgtttccaccttttggctgttatgaacagagctgcatggacatgtgtgttgcagggtttgtgtggacactgtcttcagttctcttggatctatactgaggactggaattgcgggatcctgcagtgactctgggtttaactgtttgagtagtggccgggctgtcttcccggagtagaccagttttctaagctccttttccttgttctctgctgtgccccttctgtgggagctgaggccctgcacccttaggcgtcctcctcgtgcccctcctccctccaatgttactgggcctgttgttggggtctgtagtgtttctgtatggctctgcagaggccaggctcaccgccggttggccttagctcaaggtccaggttcgtgttggctgggattcctgcccaggtccatttggaatattccacttgcgcgtgaagcaaaggcccaagtatatgaagtggcgtgcccaggcacagagcccctttctgtacacccagctgcacgcgcggggaggagctgacatcccaaaaggccacgcagaggtgggagctggaggacacagccctgcagtatctgctggggtgagccctgcaccactggcagcccgctccccagcctggtgggtagggctgttttgggagggcctgcaagtgtggaaacctacactaaaaatagcagccacatgcctcctgtgggcggcccacgctcacctctcctggcaccctagcgtgcccggaagcagcagggtgggagggcacaccaggccccacacaagcccatactgtccttacacgtatgcatgaggctgggtgagccatgcacacccaaggccaccctccacagccctgtatcccatgctagggtttggggtgccccagaaatcaggaatcagaatagctccatttgcaggaagacatcacagcacacatgcagccatgatgcagcttccccagtgggtccaggcgggcgcactccatccacctgctattcggtttgcaacaaaactaacactctttttttttttgagacggagtcttgctctgtcacctaggctggagtacggtggtgtgatcttggctcactgcaacctccgcctcctgggttcaagcaattctcctgcctcagcctcctgagtagctgggattacaggtgtgcaccaccacgcccagctaatttttgtatttttagtagagagcgggtttcaccatgttggccaggctggtctcgaactcctgacctcgtgatccgcctgctttggcctcccaaagtgctgggattacaggtgtgagccaccacactcggcctaaaactaatgctcattaaacagacaagggcagcttcccgtccactggtcagatgtggctactggccagcttgtgctgtgatccccagaaaggtctctccagagcattctcatttcagcatggcaggttagggattgaggtgtcgttctcacccccaaatgttgatgacccccggggaacctccaaccctgtggccacatcctgctgtctgcaccctgaatatttgggcctatatgctcccttgccctccctcagccctttggagggcctctcctgcccccactgggctctggggcctgcagttcccagcctgggcttcgggaaggatttccgtgcctgttcagggacctttcaagcacagtttttattattgtcctggggctgccactacaaatgaccacaaaatctggtggtttaagaaacagaaatgtatactctcccagctctggaggccagaagtccaagatcaaggtgtgggcaaggttgactatctgtagaagcctctaggggcggatccctcctgcctctgggggctcccggagctccttggcttgtagccgcatcactccagtctctgcctgtcttcacatggcctgtgtgtctgcatctctttccccttctcctctcttttttttcatttgagacagagactcgctttgccacccaggctggagtgcagtggtgcgatctcggctcactgcaacctccacctcccaggttcaagcaattctcctgccttagtctcccaagtagctgggattacaggtgcacgacaccacgcctggctaataccccttctcttctcttctaaaggcccttgccattggattagggcccaccctactccaacatgactttaactcaattacagctgcaaataccttatttccaagtaagttcccattccaggtgccaggggtcaggacttggacatacttttctgggagtacgtcccacaacagaaagtaagtactgtggtgcaggccccatgcccagcagggagctgcagcctcccctcagccacctgtggccccggggacgggcctgtcctcccctcttcccctgcttctcagtgtgtggacatcatgatgcttttgctttcgtcatttgtgtgattgcatcttggaaccaagtgctgtttgcacgtgcaggtgggctcccaggcagggggtctctctgagttggcctgtttggaggtttgtcccagccaaggggcccacctggctgaacccaccctgctcagggctgcatcctgtttccctgttgactttgctgcagcccacgctccttcctgccactgcttgtggttggctgctgtttggagctgtccccggcattcctgcacccgaagcctgggacaggtgtacgcttatgtgctggcagcggttggcggggggggtgtcgccaaagagcggggatgctgagaatggtccccttgctgggctgcaggtggggagggatgcctccgggattcccagagtcactggtggcatgtgccccccgctgccctgcccagtgccccgccctggggaccctgtagtgagtgcagcagccacagcccacccttgttgggggctgtggtcttagggtggggacatcagcctgagggtcattattggaggtggggccagaatgtggctcccgaatgactctttttttttttttgagacgcaatcttgctctgtcacccaggctggagtgcagtggcacgatctcagctcactgcagtctccacctcccaggttcaagcagttctctgcctcagcctcccaagtagctgggattacaggcgtctgccaccacacccagctaatttttgtatttttagtagagatggggtttcaccatgttggccaggctggtctcaaactcctgacctcatgatccacccaccttggcctcccaaagtgctgggattacaggtgtgagcaactgtgcctggccggctcctgcatgactcttagcccaggtgcagcccagcaagcattagcgtgtggagagcccagcgggcattagtgtgtggagagggcatggctagtataggggctagcgagtagagcatgctgtgtcgtctttcctgtagagctggagtgacctgctcaggtgggaagtttggagagactccagctgagtggtttgggcgctgcagggttaacttgagaccccagtaggaggcttctgtatttgtccaggcaagagaagatgtggcttgggccagaatgaggacagaagaggcgagagggcagaagaggtgctgggacatgggggagccaggtggggcatggggggttcctaaggaagggacaggtttgggcagttgtgaatgtgctcgtgtgtgtgcaagtgagtgggagctggcgtgcaggcaggacaggagtgcaggcaggacaggagtgtgagcatgtgtgtgtgcgtgtgagcatatgtgcatgcacgtgcatgaatgtgtttatgtgactatgtgcattgctgtgagtgtgcacacatgtggctgggtgcatgtgtgtgaacacgtgtgatgtctgtacagcctccctggtgggtgactggcgctgggctggagacatgagtttggggagctttgagtgaggggtgatggtggcactcccagggtggggctgagagggggctgctgggcttgggagtggagggcccaggggaagtctttcccctagcaccctctcccagggtcttcaggctgtgtgggagccaggactgggtctgtctccttgtggcctctgtccttggtgcagtaatgaccactgggtagtggcccttggggtcaagggcatccctggagcccttgccatagatgctgagctggagcagggctgccaccccatactgttcaggggccagtccctcccctctggagctgatcaccccaaacactgtcccctcagaagggtcgtagtgctcactcacaggagcctgtgtttctgcctgtgtgtggggcactggggcccagagaggcagacacagatgcgtgcagccaccagcttggatgcaggacccctgggctcaaacactgccttccagtctcagcctacagtgagtatgggcggggctggaggatgcagctcagagaggagggtgcagggttccggggtgggccaaatgccgggtgggagcagagcagggccgcagggacatgggagggcctctcgcaggacggtttctcatgccagccctggtcaaggcagcagtggtttccagacacgggggtgcgtgtgtgaggcaggaacagtacaagcagagggcccctggggagaaggcctttgacagcaggaagaggacctggcagtagggacaggagtgagggagaagaaaaagacagcagggcctgggcagccccgtcacggggctggctttgaatcttacttatctattgttgaggtgaacaccacataacataagattcaccatctgaaagtgaacagttccatggcgtttggcgcattcacagtattgtgcaggcatcacagctatctagttccagaacattctcatcatccaaaggagaccttgtccccattagcagtccctcccctcctctcctccccagcccctggcagttactaatctgcttcctgtctctgtggatttgcctgttctgagcatttcagatcgatggaatctcacaccctgtggccttctgtacctggcttctctcactcagcatcacatgttcagtttcatccacattgtagcatgggtcagtgcttccttccttttttgttgttcctcttgagacagggtctcactctgtcacccaggctggagtgcagtggtacgatcacagctcactgcagcctccacctcttgggctctgtccaacctcccacctctgcctctcgaatagctgaaattattggtgtgcaccaccatgcatgcctggctaattttttttttttttttttagaaacagggtttcaccatattggccaggctgctctcaaactcctggcctcaagggatcttccctcctccgcctcccaaagtgctgggattacaagtgtgagccaccgtgcccagccttcattccttttcatggctgaatcttattccactgtatggacagaccagtcttattcattcatcccttggcacacacgtgggttttcccaccttttggctgttgtccattgtgctggtacacacactcatgtatgattgtcttcatttcgtgggggcatccgtccaggagtgggattgcttggtcataacagcagctcagcatgtcacttgttgaggaaccgccatacagattgggggtttattttaaataggatggaagcctactggtgtgtttaaaacgggagcataacacgatttgaactgaatgaataaagagaagaaaatgaaggagtctcggcagccacttgcagagggagcagggaggcctgggaggaggtcacgtgggtgtctgggtgcgagatgacacgggctagtaccagggagggggctgacgatgggccctggaagtcgagctgctgggaagtgatcatgggagtgatgaggcaggcagaggaaagggacacctccagcctctgtccctgcttcttctaccctggcgggcgcagcctccaactagtgacccctcctctgggcttggtccttccctgcatcgtgtgtgtctgctgggcactccaaatgtggtgcctggccccgctagcccagaatgcggcctgaagatggtgagacaggcaagggctaaccccaccgggtccccagggcctgcagcaggtgccacctggggcctggctaggagttcaggggcctgggtgaagcctttgggacagggctgtgagggcactcaaggggtaccaggtgggccccggcaggcccaggatctggccttccaaatcacaaaatgacttttggtgttatgtaactccatagtcaagctatgtctaaaaaatggagcataaaagctattttgggcccatggtaatgagggcatctcgcctttgtcttagccgtcctggggggaggcagcgtcgaaagagctgctcagagaggcgggttcagcccagaccccaagcaagccctgtgtcagcaggcagatgccgttttcaaaaatcatttgttccgcctcgaccggaggtggctcctggcagatcgccccgcggtgctcagaatcccagaggcctgcgggcggctgacccggggcgagcagggctgggcctcctctgccgtgtctgggatctgacttccctgaggttaggtccggcacctgtcagaaaccaggcctgacattttcaagatgggcacaggcccgctccgggaaggccccaggcccgtccatgtgggcagcgtcggcgtcgggcttcttgcctgggacccaggggccgctcttggggagggagaccctgtttcaagtggccagcatccccgccagtggtttgcattattcaattggtgataagatttaaaattaaactgcaaaggatctgttcccccagctacaaatagacgtgtgcttgcacattccagaacacaagtgtgcaccaagagatgtgttttgagtcaaggtggagaaaaagtgagtttttttgttttgttttgttttgtttttgagatggagtctcactgtctcccaggctgaagtgtagtgacgcgatctcgtgtcactgcaacctctgcttccctggttcaagcaattctcctgcctcagcctcccgagtagctgggattacagatgtgagccaccacacctgactaacttttgtattttctttctttctttctttttcttttttttgagacagtctcgctctgtcacccaggctggagtgcagtggcatgatctcggctcactgcaagctccgccttccgggttcacgccattctcctgcctcagcctcccgagtaactgggactacagtcgcctgccaccacgcccggctaatttttagtgttttttttttttttttttttttagcagagatggggtttcaccatgttagtcaggatggtcttgatctcctgaccttgtgatccgcccgcctcggcctcccagagtgctgggataacaggcgtgagccaccacgcccggcctaactttggtactttcagtagagacggggtttcatcatgttggccaggctgatctcgaactcctgacctcaagagatccacccaccttgacctcccaaagtactgggattgcaggtgtgagctgctgcacccggctgagttttggaattccctctctttctctctgctcatgtacactatgtgcacgcatgcatggggccctctctgcccgagtacactgcctgcacacatgcgtggggccttagtccttcctttcctgttggtggctgtaacaaatgaccacaaactgggtatcttaaaacaatagaaatgtattcagtgcaggtgtcggcagggctggtgcctgcaggaggctctaggggaggatccttcctgcctcctccagcttcagtggctctaggcgctctttgcatcactccagtctctgccttcattgtcatgtggacacctcctctcactgtgtctcttctcatcttctgaggatgctagtcattggatttaaggcataccctactccagttcaacctctgttttttttttttttttgagacggagtctcgctctgtcgtccaggctggagggcagtggcgcgatctcggctcactgcaagctccgcctcctgggttcacgccattctcctgcctcagcctcccgagtagctgggacttcaggcgcccgccaccatgcccggctaattttttgtattttcggtagagacggggtttcacagtgttagccaggatggtctcgatttcctgaccttgtgatccacccaccttggcctcccaaagtgctgggattacaggcatgagccaccacacccggcctttttttttttttttttttttaaacaaggtcttgctctgtcgcccaggctggagtgcagaggcacaatcatagctcacttcaacctctgcctcctggggtcaagcgatcctcccacctcagcctcctgagtagctggaactacaggcgtgatccaccatgcccagctaatttttgtatttttagtagagacggggtcttgctatgttgcccaggctggtttcaaactcctgagctcaagcaatccacctgcctcagtctcccaaagtgttgggattataggcgtgagccatgcacctggcctcgacctgcaaagactctctccaaatacagtcacattcatagatggcggggttaggacatggctatgtgtttccaggggacacaggcaacccacagcagacattctgccaagtccatcatcactggcccttactgaggtcccccagcctcctctgggtctgcccaggaggtgctgtgacgtacttcaccccatgatccagcacatgggagtacctaggtcaccgtgcagccggggtctcagcagaggccggagtctgccctgagtcaccagaggctgtgggttttggggatatgcaccagagacccccacacctatgcatccgctgactaagttccagatgagattcatcccagccttgctgccatcctgccatggggagcttgcagccctgaatgggagacgagaaaacatgccaagcagttatcaacttgtctggggccccttggctggggagaggagacctggggtgtggacgcaggccacaggcatgccaggtgcctcccagctggcttcagagatgctgggggagtggattggagagtatcccccagacatatgcgcccatgtcctaagtcctggaacgtgtgactctggccttatgtggaaaaaaggtctttgggggtgtgatgaagtgaaagaccttgagatgagatcgtcttggatttaggattggccccgaatcccatgactggtgtccttatttaaagaggagaagacacaggcacacagcgagaaggccacgtgatgaaggaggcagagaccagagtgatgcggccacaagccaaggaggccaaggactgctgacggccaccagtttttgaatggacatgatgttcacataacatgaaattaagcattttagagcatgccgtggtggcgtgtagcacactcccagtgctgtgcaaccttcccttctgtctgcgcccagaacatttccatctccccagagggagacctcaccccgcaggtagtcactccccatttccactcccagccccaggcaaccactaatctgtctctgtggctttgcctattctggatatttcatatcaatgaaaatctgacaccatgtggccttttatgtctggcttctgtcactcagcatcgtgttttcgaggtttgtccatgctgtagcatggatcagtgctacagtcttttttttttgagacagggtcttgctctcttgcccaggctggagtgcagaggtgcaatctcggctcactacatcctctgcctcctgggttcaagcgattcttctgcctcagcctcccaagtacctgggattacaggcatggggcaccactcctggctaatttttgtatttttggtagagatggggtttcaccatgttggccaggctggtctcaaactcctgacctcaagtgatccacctgccacagcctcccaaagtgctgggattacaggcctgagccactgtaattgcccggcctacaatcatattttgttgtacggatggaccacattttgtttatccatttatttggtgggttttgtctttcggatgttgttaaccgtccacctaccgtttgtaagtttgttgacatcttatctccaatctccccatggggagagacggagacctgtctcttcccatctgccttagcatccttgcttctgaagacagctctcaggaagtagcagggcgtgaggaagggatgaagggtgggtgtctgtgtcaccacagcccagaggtgcggagccacgtggtgtctccatgctgtggcttaaagtgttggaagtttgtggccaaggccagttcaccggggaccccaggtccagtatgggtttcctaacggtgggcttgcgtcacattagataaaagacctgagagagaactctggagggcaagggggcatctggttggtatttctgcctgattgccatttgtctggggcctggagagggagccttagctatgtgtttcgatgtggtcagatggcctgtgggcaacagggcagttgccctgcagggacactggtctcagatggagtgagacagcccctgcgtcgacccaccttgctgcctgtgccagctccacagcagcctcgtcagtgtggggcacattgcacacgccaccgtcatctcagttgtccccgtgcgcttggagcctccgggagggaggatgcacgttggcgtgttaatggcgatggcattccaccgtcaccccaggcagaagcagacactgtatgctgcacttatgagacatgtgaaacctccctgcacagaacagagcatcccacatatgtggtcatgggagttgagagagcgacaccgtgagcccaggcttgttccctgggctccaggcgggaaccggcggggcggacaggctcctcggcagcatcgacacggctccctcgtcccctctgcagatggtgaggccccaggagggagcagtgacagctgatcagtctgtggggtggggtgtgtgggtgcgtggggtgttgttctctgcactcgctaggagtcaatttcattttcatcttagaggtgatgggttgttgctgtgtgtggggggattccatgatgagctggctctaggatcaagggacctggggtgttcaggttctcagccctgccctggaaggggagacagcagcacctattgggactggggggccatgtgtgagtttctggtggctgctgtaatatattaaagtactacacctgggctgcttagaacaagaatgtcttctctcatggttctagagcctggaagtctaaaatccaggtgtcggcagggccgagcttcctctggaggctctggggaggaatctttcctgcctcttccagctttcagtggctccagccgttccttggcttgtggctgcatcgccccaatcccggccgtccccctctgcatctgtgtctcatcttctgtctcttaaaagggcagcagtcacccgatgtagggtcctcccggctaatctaggatgatttcttcatcccaagatccttcccttaattatgtctgaaaagactgttttttcaaataaggtcatactctcaggttccagggatgaggaggtggatataaccttttggggacaccgtgaattcactccccagtagctgagctgacctgcatcgagcgcttgggatctgcctctcaccctcttggttgccttggcagttccctaaggcctctgaccctgtcaccccctgcccagcttccctcagcacactggccccacccaggagcgctcctgttggtccgtcccttggacccgcctggagctggggggtgtcccctttgtcctgagtacacacccaggagacccctgtatgcttcaccttggggagctcagtatcttttcttcatagcactctaggccagcgtccctgtgcgagacccccttgctccctagtgcccctgcctggcccctcatggcaatgctgagggggaggcctcctgtgacctctgacctctgcaggcctctgcacctccagccccttctctcccccagctcgggcctgaggccagcaccccttaggtggcttgatccatctcagttgtccctccctgtggcctccagggagcccctgtccagctcccagaatccttgctctctgtcatcgcttggtttctgggttcctgcctgtctctatcctggagaggagaaggaggaggacccagaacctaggaggcctcggccaccctcctggagcggaggttggggcagcctggccagccgtccccacacacgggcccctgggttcagcgttggagaaggcatcagtgccagacctgtggctatgcgtgctcacaggggcaccaggctgccggctggacctggcttggccacttgcatccctggggaggcctggccgtccttggcgccagcccctcctccctcttcctgagcctcccacctctctggcctgtgttaggggcttctttctcctcttctgagtctaattctgtctttctcgcgtggctcaggtattccgccaccttcccccaacacagcctgcatggtctccctctcctggcttacagggtccgcctcggccctcccgtgttctggagaattcctctctccccgtgtgtcgcgcttccggggctgccggtcaccctggctgctcctgctgcccagatcccctggggacatcccagggacgggggccacccagcctcagcccaggtctgcctgtgcccatgcagatctgcagtaaagatgttctagaaagtgcttcctcccgactcatgtaccgcgccctcgatcttctctggagttgaggccgggccctggaacaggctccagctccttgttctcccagctggtgatgcaggaacatctttgcgcataaatctgcgttctggatgatttccctcaggagagcttcccagaagtgggattaccaggttagagggcaggaacgttgctcaggcactcggcggacgctgccaaatggctcagccggcgctcccagccacctgcctctcagagccccatgcatttccagcaccgctgacgtgtgccggcctcgcttcacccctcggtccccgggggacagcagaggaggcccaggcccgggaggggagctggctgccccagaggagccctcaggcggccagctatagggatgaggtgagagccatgggcatctgcttccttgggatggttcttagagtgggctggaggtgacctggggtttggtgagtgtatggggttgaacagtgtcccctcaaaagttcatgttcatccagaacctgtgagtgagctcatttggaaatagggattttacagatggacttaagtcatgatgaggtcattatggaatagggtgggccctaaatccagtgactggtgtccttataaagaagacaaaggctgggcgtggtggcccactcctgtaatccctgtactttgggagaccaaggcgggcggatcatgaggtcaggagtttgagaccagcctggccaacatggtgaaaccctgtctttactaaaaatacaaaaattagccaggtgtgatggtgggtgcctgtaatcccagctacttgggaggccgaggcaggagaattgcttgaacccaggaggtggaggttgcagcgagccgagatcgtgccactgcattccagcctaggtaacagagaaagactccgtcttggggaaaaaaaaaaaaaaaaaaaaaaagaaggcaaaacaggccaggcacggtggcctaggcctttaatcctagcactttggaaggccgaggtgggaggatcacttgaggccaggagtccaggtctagcctgggcaacatagccagaccccatctcagcaaaaaattagaaaataattggccaggcttggtggtgtgctcctgtagtcccaactactcaggaggctgcagcaggagaatcacttgagcccaggagttcaaggctgccatgagctatgattgtgctgctgcactccagcctgggtgacagagtgagaccctgtctcaaacaaacaaggcaaaacagaggcacagggacagaaagggaaaaggacaaggtcaggcacggtggttcacgcgtgtaatccgagcactttggtaggccgaggcaggcaggtcacgaggtcaggagatcgagaccatcctggctaacacagtgaaaccctatctctactaaaaatacaaaaaattagttgggtatggtggcacgcatcagtagtcccagctatgtgggaggctgaggcaggagaatcgcttaaacctgggaggtggaggttgcagtgagccgagatcacgccactgcactccagcctgggtgacagagcaagactctgtctcaaaaaaaaaaaaaaaaagaagaagaaagggaaaaggacacaagcagacagaagcaaagaatgaggcgatccgtctacaagccaagaagtgctaaggatggtcagcagccgcaacagctgggagagaggccaccttgcttttattttatttttattttttgagatggagtctcactatgttgcccaggctgaagtgcagtggcacaatcttggctcactgccacctctgcctcccaggttcaggaagttctcctgcctcagcctcctgagtagctgggattacaggcgcccatcaccatgcccagataattttcttttgtatttttagtagagatggggtttcaccatgttggccaggctgatctcgaactcatgacctcaggtgatccacccacctcagcctcccaaagcgctgggattacaggcgtgagccaccgtgcccggcctccaccttactttcagagcctccagagctgtgcgggaaacatctctgttgtgtcagccacctggtttgtgcttatttgttacagcagcctcaggagactgatatcatgcccaagagttggggatggaccaagggggactctggggtcaggacaagtgacccctcccctggtgtcctggccctcccggtgaggttgcacagaggttgggagaatgtcccgtcccggcccatctctgcctctccacccccttatgttactaggtgaagaattgtacattagcctcatttgaaactttatttccaggcctcttcagcttcaatcgctgcccaggatgcattgtgggtaagcaaaaccaggacaatgggcttgggcttaaaagtatcagagatcccgatttcattcattcctgacaccaagtcacttgaaaaagcagtcgtaacatcacagagcagctccggggaagttctccgtgccttatcctctttttttaatttttttggagatggagtttccctcttgtggcccaggctggggtgcaatagtgcgatcttggctcagtaacctctgcctcctggtttcaagtgactctcccgcctcagcctcctgagtagctgggattacaggcatgtgccacgacacctaactaattttgtatttttagtagagacggagtttcatcatgttggccaggctggtctagaactcctgacctcaagtgatctgcccaccttgacttcccaaagacctcccaaagttctgggattacaggtgtgagccacctcacctggcctttttttttttttttgagacagagtcttgctctgtcgcccaggctggagtgcagtagcacgatctcagctcactgcatcctctacctcccgagttcaagtgattctcctgcctcagcctcccaagtacctggcattacaggtgcctgccatcatgtctggctaattcttgtatttttagtagagacagggttccaccatgttggccaggctggtctcgaactcctgacctcaggtgatccacctcccttggcctcccaaagtgctgggattacaggcgtgagccaccgcacctgcccgccttgttttctttagaagttggttcaggctggccgggcgcggtggctcacgcctgtaatcccagcactttgggaggccgaggtgggcggatcacgaggtcaggagatcgagaccatcctggctaacgtggtaaaaccctgtctctactaaaaatacaaaaaaattagccgggcgtggcggcgggcacctgtagtcccagctactcagggggctgaggtgggagaatggcgtgaacccgagaggcggagcttgcagtgagctgagatcgcgccactgcactctagcctgggcaacagagcgagactccgtctcaaaaaaaaaaaaagaaaaaaaaaaagaagttggttcaggctgggtgtggtggctcatgtctgtaatcctagcactgtgggaggccgagtcaggaggatcattggagctccggagtttgagaccagcctgggcaacatagggagaccgcgtctctactaaaaataaattggctaagcgtgttggcctgccgctgtagtcccagctactggggaagttgaggtgacaggattgcttgagcctggaaggttgaggctgcagtgagccatgattacaccactgcactccagtctgggtgacacagcaagaccccatctttaaaagaataataataataataataagttggttcagtttcatttgcttggaagccccttcagttcccagccccgcagccctgtggcctcccccagaggtggtgtccacactccttatcctcgttcttggccctgctggagcctgtggcagattcctggggttgcctgtgaaaccaggagctgtgactcctgcctgggcctcagtgattatggtggggtcacgcactgggtgccagggtctgccacaccccacccaggggccactgcccagcagcaagtgcacttagccatgcagctccccacacagatcgaggtgggatggtgctgggtgccagccatcctgtgcttatgtcctgtccaaggccggccgtggcttctgatggcttaccctgggaaggtggcctgcaccttcagctggccctgctggtggcgttggtggggatgggctctcctgagggcctcagcagcccttacgaggtaagggctttttgccgtgtgtagatcccacgaagcacatcaccagctcctcactcagggtccctcctgcctcccctggatctgctggggcatgtcccaggcagggggcgcctggtgaacaccgagcccccctgcttcacacgctacctggtgcagcccctggactttggggtggagtcggggtcacattcacagggccttccgggtaggcctgtcttcaggatgggcccttctcccagtgtactggggcccccctacgccctacagccctgccgtggagtcaccggctgggtgttcgccgctccttgtgctgtcctggtttgggcttcatctgcaccctccccgtccctctgcagtgactaccatgagagctggcctggcctggtctctgctccctgtgtccagcctccactcccacccctgcagttcctgctgcccgacccgctgcctacctcatccttcatcccggacggttcctgtaaccacccctcccaactccctagtctcaggatccctgccccctctgggcccttattgaccctactcttcagccagtggtgtcccccttggtccccctactcctggggaccagcccagaagccaccagtggcccccctggctgtctcctcctggtgtgccccgagtcgtggccttagttgagtcccatgtccagagggagcttggagagggaagggcttgtcccaggccctccacagttccggggctgagtatccttccctccctccctccttccctccttccctccttcccttttttaagagacagtgtctcgctgtcacccaggttggagtgcagtgagtggtacaatcttggctcacagcaccctccacctcctggactcaaacagtactgcctctgcctcccgtgttgctgggactacaggtgtgtgccaatgtgctcagcctgggctaattttcttaggctgccatagcaaagcaccatgaatcaggtggcttaagacaatagaaatgtcttgtctctcatctctgaaggccagaagcctaagatcaaggagtcagcgtggctggttcctcctgaggccatgagggagagccagtctcaggcccctttccagctcctggtggcccagcgatcctcggcaggctcttgacttgtagacgcggcaccccgatctctgcctttattgccgcttggcccactttcctcagtgtctctgtcctcccctctcatgggggcaccagtcattggatgcagggacctccttaattccaggatgatctcatttcaagatcccgcactaattacatctgcagaaactctctcttttcaaataaggtcacgttccgaggttttggtggacatgagtttcaggggagctgtgagtccatctaacacaggacccgattcatcctgggctgcctggccttgaactctgggctgctcctgctaccttgtgctgcctccagctggacagcaggccccccgctagcccccttgcgtccccagcccgtgaaccccaccgagcaggcacgttgcttatcttcgggagactcattccagaaacaccgcccacagcttcctgctcgtcacacctcggctgcctggctgccccggggggtggggggaaggcactgctggtcacctttgtaccacagacacttggccctttagggctagcgcacactggagcccgacccaggaaccccctctcctcacccaccctgcaccccgggggctcctgcagggagagtcctgggctccgtgggcttcacctgggtttggctgcctgtggttgccccctgatgacttgggatgtggggcgattctgggctgcccagtttcagatacacctgtctatggacagttcctgtaattcctgggggtgatgctgggcccccaggggcagggcatgttggcctgcagaaagacacaggcaggcggcttatttgtgagcaggtgccacagactgaattctgtctcccacaaactcacaagttgaagccttcacccccagcgaggctgtatttggaggtggggctgttaggaggtagttaaggttaaatcaagccataaagggggggtcccgatctctaggattggaggccttgtaagaagaagaagagagatctctaagcacacacagctgggagaggccattcgaggactcagaaggttggccccccagggccaggaaaggcgctgtacctggaacctggtctgggtactgctgggccctgatcttggacttccagcctccagaaggaaggcattctgtccagaggaagacatttctgtcatttaagctgcttggtctttggtattttatcatggcagcctgggctgctaagacagaggattattttggatgcagggattgggggtctggcagggcttcctggggaggtagtgcttgaactgagtcccagatgatgaatgggaactgttgtggaaggttccagacaagggcttcgtgggtgcagagcccagcagcaaaaggcagaggagggccttgagtgccaccagtggggagttggggtttgcctctgggggaaggaaaagagagctttaaacctggggatactccagaagcctttcagaataactacaggaggccgggtgtggtggctcacacctgtaattccagcactttgggaggccaggcaggaggatcacttgaggccaggagttcaagaccagcctgggcaacataggaagaccccatctctgaaaataaaaaacttagttgagcgtggtggcgggcacctatagtcccaactactcgggaggctgaggcaggaggatcatttgaatccagaagatggaggctgcagtgagctgtgttcactccactgcactccagcctgggcaatagggcaagacctgtctcttaaaaaaaaaaaaaatgatgacaagagacagccctcccggctggggaaagagcctggattgtaactgaggcccctcctgtcttcccttagtgcctcaatttaccagcttgcaaaataagggtacagctgtgtctccctgctcttaggactgctgcaaggccccacacagggtgggcgcttggccagctggcagggctggagtctcttttgtggggagggaggcccctgtgagccagctgtgtgcgctcagcccccgagggacccttcacacgtcccagccgccacctacaagagaaacaaaacgtgctcacggcagaccctctgttcagctgggtctggaaatttggcagcagcaaccatgcctgataaaaggcattccgaggcaggcctggtgtttgtatatgtggttctgtatttacatgagtggagggagcaaggaggcagcaggggagtgtctccagggcccaggagactcagcctggaatccacgtgcccctgatgctctcatcatcattccctatcgcttcccaagctcggcagatgtttactgaggaactctggtggaccagccatgcagcgaggggtcagctcagctcttctcatcaggtcctcagtaaacgtggggacccacggcatggagggactgaggcaaaaacaaagttgacagccagaatgaactcagaatgggccaaagacctaaatgcaagagctagaagtgtaaaactcctgtaagaaaacagaggggctggctgggcgcggtggctcctgcctgtaatcccagcactttgggaggccaaggatcacttgaggtcaagagttcaagaccagcctggccaacatggtgaaaccccatctctactaaaaatacaaaaattcgccgggcatggtggcgcgtgcctgtaatcccagctacttgggaggctgagaatcacttgaccccggcaggtggaggttgcagtgagtcaagatcgcgccactccactgcagcctgggtgacaagagtgagactccgtctcaaaaaaaaaaagtccagaacagataaatccacagagacaggaaacggattagtggctgccaggggctgggggaggggaatggggagtgactgctgatggggatggggtttctttatggagtgattgaaatgttctagaaccagacagaggtgatggttgacagtgtactaaatgcctctgaatcattcactttcaaacaagatcatggtaaattttttatgtggattttattgcagcttttttgaaagtatatttttcatgtaaaagattaaaaaaaaatagaaagaaacaggccacagagagaaaccaatggtgggccgggcacagtggcttacacctgtcatcccagcactttgggggccaaggcaggaggattgcttgaggccagcctggacaacatgggggaccctgtctctacagaaagaaaaaaaaaaaaaaggccatggtggtgcacaccactactcccagctacttaggaggctgagatgggaggattgtttgagcccaggaggctgcagtgagccctgatcgtgccgctgtactccagcctgggccacagacaaagaccctgtcgcaaataaaagaaagaaagaaaacagatgcgggacgtcagtctcaggctgtggccttgctgctccaagctgtgttcccacacacacagtttccagaggtgggcagtggcaacaccctggggagggtccgtcagggctggcagctcctgctacacagcaggtgatcccctcagtcactagcctctcctgttcccctgggacccagtgcctggaggtgggcagcagctcccacattccctgtgtaccctgcggccattacccagccccggcctctgggagaatgaatcggtcaggggatgctgggcatgcatcccttacccctatggcgaggcgtccgggcagaaaatcctcccccacaacacgcacaggtgatggcgacgggcttctgagcaaaatgcgtgagatctggggctctttgctgggcccttggaggagcacaggaggaggcttgagggtcagacatgggaagttctatgtccacaagtcaggggcagaaggctttgctgcagcctccgacatcacttggagctttgggggtacctgtcagagacttggatgccccagggctgggcagaggcctgagggctcttgtccctgtctcccttctcacactggcatcagcccctcctggcattggggatgccatccctgctggtgcatctggttaaaagctggcctggagggtgttcacctcctttgttctgcttgatccagggcagtgacaaggggaccccccggggagcgggggatcctgagcatggcactggatcgaggcgcacgccagctcctgcaggcctcgttttgaagccgaggtctcaactgcagggagcagatggcgtgtcccctgggagtgctggggtgggggcggtgacagggctgtggggccggctctgggcagcatgggcaggtgcggcctcacagtagaggcctggagcccttaggggaagagtcctgctctggctgttgatggtaagtggctccagaagcttccgttccctcgatgaccgtatttcacccctggtggcccatctcagaccctatgagctcccagtcctgggccttggcacctgctgttcctcctcccctgcaaggctccccagtgctgtgtctctgccagtccacggccgcacagtggctcaggctgaagctcccacagtcaccacttgcctggagatctaatgcttgctgcccgctctgggctgtgggctcgtgtgagcagtgcccatctggctggctggctgccatgtccactgaacctagaaccatgcccagtgctgggcagactcttgccttgagtctggcaggggaggtggggacactgccgtggtggggcgggagctgggctggctgagcgggtgggtgcctgagccttggttggttttcagctgttgacccagctgggcttcacgccagcagcaggggttccagccagcgtggacatgggaggatgaaggctcttgccctgtgggggtgtccttcaagtcggcacacatccccgcctgcggctgctgggacgcttggagatccctccaaggcccaggcctcctgccttcattccagggtccctctgccttcatcagccttcccagaactccatcttgggaagccccgagttatggggctgcagggtcaaggggtgcgaatccccggggtcctggtcagctcccaggatccaggatccaggtacatcctgtgcattcgctgggctggagaaagtgttcgctccccaccttcctcttgtagggccatgcctcaggctgaggtgcctgctgcctctgctctcaggcagtctctgtgctttcttgagcctcagtttccccatctggactgtcaggggaggggctgtgcagagggcggccccttggaggaggctcagtgctgggcagcggtgggcccagggggaagagccttctggtacaggcagcacccgtgcaaaggcccggaggtagcgactggtggctccgggaggaagcatgtgagctggagcctatggtcatggagagtggagactagactttgaagcctagaggtggagagggggggaaactgaggcctgactggcacagacagcacttccctccctggcccccccacagggaggccctgggtctgccacggctttgcagggccgagctcagccatcagcccgcctgcttccctcaatctcattagaaggttggccggttgccatggcagttgcttctgggcctgaccaaggctggccggtctgcagagcgagccccaggaagggctggcaggtggaggtgtcgctgtgccctgtgcaggattcctgggagactgagtgctgcccgaacatctctccacatcctggagaagtagccacaggcgcattatactggggccacccggcctccattcccctacctaggggctcctgctccatccagccctgtggacacttcctgggcggggcaggggcgtagacttagcaggagtgtggacgtgggcacagacagaggcagaggtgggcgttctccagggcgagggtcctgtcagcaaggggtgggggtcagcggaggcctgagaagccacctttacgaagggctctatagaggggtcaggtgggggggtaggactttgtgtgagggggtcccggcgcaggctgtatcaggagcgggggtccctgcggtcagcttggtagtgtcagagcttctgggtccacatctgcctcccacgtgcctccactgatgctggcaagctctcatctgagatcgggtggcttcagtaacacttgtcccaggaggggccatgtgacttcagtcatgctggtcatgcaggggttaagtttcaggcatgtggggcctcagttttcccatctggagagtggcatgtactggtacaccctcaaaagccctgtagaggggtgaatcatgtcccacaaaaagatacgtccacactctcactcctggaacctgggaaggtgaccttacagttgactcttgaatcaatggttttgagccacgcatgtctactcatacgtggattctctcccgcctctgtcatgcctgagacagcaagaccaagctgccgccctcctgctgctgctcctcctcctcctcctcctcctcctcccttttcctcctcctcagccagctctacgtgaaggacggtgaggacaaagacctttgggataatccccttccacttcacaaatagcaaacattttctcttccttaatgattttcttagtatcattttcttttctttagctttattgtaagaatacagtatgtaatacgtataacataccaaatctgtcttaattgactcatattatcagtgaggcttccagtcaacagtaggctattagttaagtgttggaggagtcagaagttatactggagtggggcacggtggctcatgcctctaatcccagcactttgggaagctgaggtgggaggactgcttgaagccaggagttggagaccagctggtcaacatagtgagactccatctctacaaaagttaaaaattagccaggcatggtggtttgtgcctgtggccccagatactcaggaggccaaagtgggaggatcacctgatcctgggaagccaaggctgcagtgaggtgtgattgtgccactgccctccagcctgggtgacagagtgagagcctgtctcaaaataaataaatgaataaataaatagaagtaaaaactataaaaagaaaaaaaattatacttggatttttggccgcatgagggtcagctccccaatccccgtgttgtctcagggtcaactgtagttggaaatagggcctccagatgagaccgtcctggattagggtgggcctttctctttaattgtaagagaaaggagagctgagccaggcccagtggctcactcctgtaatcccagcactttgggaggctgaggcaggcggatcacctgaggtcaggggtctgagaccagcctggccaacatggcgaaaccccatctctactaaaaatacaaaaattgtctgagtgtggtggcacgcctgtaattccagctactcaggaggctgaggcaggagaatcgcttgaacccaggaggtagaggttgcagtgagccgagatcgcgccattacactccagcttgggcaacaagagggagactccgtctcaaaacaacaacaacaacaacaacaaagccagaggctggtgcgattgtgacttggggggctgcttcttgagcaggggtgttggggatgcccctctaaggaggggccgtcaggccttgcatgaggggtcagtggggaaaggacaagctgggggcactttggggcttgggcggctggagggagtgaggctggggaggctggaggcaaagcccacccaccctcagcagggccctccaaatcgccagtggggtccactctcacagccaggcagccaggaccagatgcccatctatctggcccacaggccatgagtgaggggcgccctgggagctgcagttttcccgactcctaccggacgccttctccaggcctcagctgtttcacctgtcgccccgcttgttgacagccatggggatggtgtggagatgggacacctgagtcccaggtcagccccgagcctctgtgtagggcaggctggagctgctgtggcatcccaggagctccctccagagctagccgctggctccaagtgagggttacaccttgaggtggcttgtgttgcctgggccagctgaggaagggggtggccaagctgccgcctgaggcctcctgggttttaatcttaagtgcttgtacagcctccagacgggcctgtcacctggcttgtgaagtcagctgtggaggaggtgcagcagcgtccattcattcattcattcaccccctcacatctttgttcacttgtggattccgccggcaggcgctgctgagcagcgggtcctgggctggctgctgggttcacggagctcgtcctcagggtctcagtggtttggggagcacagcatggtggggggcaggggactgtgatgtggcgatgagaaaagctgtgatgttgcctgcagtgcagtgacatctggccgttcttccagctgaggccagaggtctgtgggggcagagcccaagctggcgtcccaccaccctgagaccccagagaaaggaggaccctgctcccaggggttccagccaggctggggaggaaagtcagctcctgcagactcaggagtctccgtgcccaccctctggctagaaaattcactggaaggactccccagaagccgttttgttcatgcttatggtttattgcagcgaaaggacacattaaaattacccaagggaggctgggtgtggtggctcacacctgtaaccccagcattttcggaggctgaggcgggcgaatctcttgaggtcaggggttcaagaccagcctggccaacgtggtgaaactccgtctctactaaaaatacaaaaattagctgggtgtggtgttgcatacctgtaatcccagctactcaggaagctgaggtgagagaatcgcttgaaccctggaagtggaggttgcagtaagccgagatagtgccactgcactccagcctggatgacagagctagactccatcttaaaaaaaaaaaaaatcacccaagggaagaggcagatgggcagggtccaggagaaaccaggccagaacctccagtcagcccctcatgtgaacagtgcgtaattctcccagcatggagcactgccagccgcagaagctcccctggcctgcatgtccagggtctgtactgggggctggtcctgtagacgtggctgaccaccctcatggccaacctgtctctagtccctccagatgtcaagctgatgtgcccaaactcccaccctaaaaccacagtgtgagcagactctgccatagcccaaggcctcaggcacacaatgacactcttatcaggcaggatattctcctgcaggtcacctcccaggagctggggacaaaggtcagacctctcttggggccagcttaacccttttgctgtacaactcctcatgcaaaaccaagaatgagcatggggttccccaaaagaagagcagaggccaggcgcggtgactcattcctgtaatcccaacactttgggaggccgaggcgggtggatcacttgaggtcaggagtttgagaccagcctgagcaacatggtgaaaaactctgtctctactagaaatacaaaaaaaaaaattagccaggcatggtgcctgtagtctcagctagttcggaggctgaggcaggagaatcacttgagcctgggagatggaggttgtagtgagccaagatggcgccactgcactccagcctgggcaacagagcgagactccatctcaaaaaaacaaacaaacaacaacaacaacaaaaaagaaaagcagagtccccactcagtgtccactcctggcccaggggctgtgctccgaagcctgagtgcctccagcaaagtggacaggagctgggaattgtgggcaaggtttggacagagatggggcttgggaaccatgagagttctgtgtgtccccagtcctgtagattgtccccgcatcccaggtttcctgtggcccggggacatagtgtaaacaaagctgcttcagggagttcttgcccctgatgtctggcctcctgggagctggcagctcagcccgtgtagaaagcacatgtggcatgagtacctgctgtgtcacacgtcgtgtgtccctctcacacccgcctgtagcactcactctaggtcggggacacaggtccaggaggggtcacagcctttagggccatatagtcagtgagaggtgaatgtagcacaggtttctgtcatgctacttggacacagaagagggtggagaaagtcacgggaggccacaggcgacctatgcccaggtaggtgtggggtgggagctgtaggacccccaccctacaccccctccctctgccacagcccggagctggcctgtttcatctggtgtgactgctgggagggacactgtggatgttcattgtgtatgtgtctggccagcggccaccaagggctcccagcacagaccctgggcctcacccccaggccctcgagagccacccaataacacacaaggttaatcttaccatcggctccacttcagctcacaggaaacagctgtttacctgggcgaggtgctcagccgggcaggtggccagttcccgggctttacttccgcctccggtgtccagggccccctaggaagctggggcggtggggcagccagctctccacgcactgccaggagctgtttgtaaggaacgagtcggccttgttgtgtacacagtgtccaccctagcaaccgcccctgccgggccagagtggacaaccacccctccttcctgcctgcccagccccacctctcctcacggtggctgcctcccccagttgcatggcaggcatcatggaccagcatccccaagggcctcgggtcgtgccacatgggtcaggggcctctgttactggcaaatcagcatcagccacatgaaggggaggaggccagcttccagccctgttcagagtcagcgtgacccatcagggagctcctggcccctggttctgtgccccgatgccatcagggagtgggaagcagggatgcagctgagatgaaggcgctcagctgggcccagcccccaagaggctgggaaggaccatgaggaaggaacatggggctcaggaccctctagaactcaagctgggtctgggggactgacttggctgccctggctctgtgtgggctgccgtcgggatcacaagtcccacgctttgaaggccatcaccacgcttctgagacagcttcctccgattcaggccagtgggaagccgcctggcctgccaagtcacagcctctggccgtgataagaaatggctcccctgggctggtgaggggcctccttggcaggctgcaggcccgccagtgcctctcttgcccattcactgactgaccgaatcagcagcaaggcagccagctccccaggttcacggtcatgggtttctgcatggtgcattgccccgcctggggagccgtcccggcacctcgggtttctgattctgccatttttggtggagggacacctggtttccttaagcatctgggtcatgaggtcctgcaaacttctgcacttaggctgtcaatcccaccacttgggtctttttgtgcctttggggctggcactctgaggtgagcctgggaggtgacccctcccgcagctgctggcttctctctcgcagctccagctccagaaatcccagtacctgcaactgggccccagccgaggccagtactatggcgggtccctgcccaacgtgaaccagatcgggagtggcaccatggacctgcccttccaggtgagtgccccgccccctggccctgccccattgtggggagcttcccccagcctcccactgggggccagacattgaggacagctggggttatcagacagttggcggagcccacccaaccactgccttctccttgtctgccctgggaaccagaggaagcagagtggccccaccagggtgcccccgcagcccattccccatcagcagaccccgaggcgagccctccatctggcctccagcatttcggcagccgctacacctgttggccggctgtgcggcagcgggaaccgctcggggccactggggcttggctctgtcctgcctcactaatccgcaagcccagcaattctcagaaggaggcccggcggcctgaccccacttgtctgcaaacgtttcttggcagaggcccacacagcgcggctcccgcaggccgcacagccgccgtgcacagccttatcgtaaacaggagataaggcccacagcggccctcttccctgtccctggtctgcgggtggagatggggatggggtggggccgagggagctggcctatgaatcagggccacccccaggacggtgtctgggctctgcatggacaggtccccctgggggggggtcacacctactctgtggctgagaaaaccacctcggacacagccatggccactgacaggccagatggagccggggcccctcccaagtcacccaccagctccaccgccacctgcaccgccgctggacagggcagggatccttgggctggccaccacggtgcgcctcctccggcatacagagtgcgggccatcactgatgctgggcgtgttctttgtcacagcccttcctggccaggttttctcccctcctgcccttctctccctttcctgtttctcctgtcccctcttccctggaggagagtctctctctgggcaccttgcaagctcagcctgagtggggctgaggggcacaggaccctgttgggtgtctgtcgcccgaggcccacagcccggggggaggtcccacgcatcccgcctttggggccaggcaaggcagcagcgtctcaaagtctcggttctttgcattttcagcccagcggatttctgggggaggccctggcagcggctcctgtctctctggtaaatgagcccccaggctgaggccgcggcgtccccggcgccagcctgcaagaccccgacccgtgtgcgggcgctggggatccctgagctccccaagcggccgcccctgcggctcccagggaggtggaggtgtcccgtccgccaaatggaaatggatccactccgcacccccatctcgggaagtgcgtatggtcgcgtcgagaggccctggggactcttggggtccatctggggcagatgccatagccgcgcatccccatctggggtccagcagagcagaatcccagcatgtgccccaaagctgcatggtccgtccctatatacacacacacacaaacacacacacacacacacacatacacacacgtgtgcacgcatctcccaaaccaggccagcaggcaggacgtggcgagcccgggtgtggccagcccccgcttcattctgcctctgacttggctttggctgcctcagtttccctctgggcttcaaggcatctctggaaggagatgaattgcccctaccctgaggagcctgtgcactggacagcacagttcccaccctcatcgtcacaggcccacgtctcccatgcccacagccttttgggggcaagagccacggaaagacccaaaccagcagagttcatgctggatcgaagaaagacttgggggtccccagggctggggacagtagtcagccctgaactctggccgaggctgggacaaagcagcaatcctagccatggacaggcttctggagaggagactcactttagtatcagagtctcattttgcccggctgcccagagaaggcataagggctcaggggccagatggccggactgggggattggctgcatccaaagctggcagagcctgctgatctcaccccagtcagatggcaagtgggcaacacagggtcagggcgggctcctggcagccccgggggcatgaggccgggcatgtagcagggcctggggagggccagcctggtgccagccccaggtgctgggaggaagccccatccagccaagcagtgggccatggctccggaaggcgcctgtacttggctctggtggtgcctggagtgcctggaggaggctgcgggggagggtgtgtgggggccgcgtctcaatcaagagcagccctgggctccacaaggaagcctcccaggaactcgcgcttggccaggtgggccccgaaacagtcctgggctggaagcccctgggctgtctcttggcaggcccctccagggatgacgtaggtgggggtaggaggccgtccaggcccggagagagagggcggaggcctgtctgcacctggtgagactggggaggagggctgcctaggccggctacatccctggcacccggcgggcgctggccccgagcttgtgccgctctgcctggcctgtgcatgccagctgcactgcacgcccctgccaccctggctcccgggaccccagctcacaccccctccctaccccccagtgcttggagagccagggagctggggctgaaggaagaagcccatcccaggctgtggagcgatggccgagggtgctccagagtggggggccctgcgatcagactctggggccagcgctggggccacagctggtaaccattgtttggatttctctctctctgtttccatctcctcctcccccagacccccttccaatcctcgggcctggacaccagccggaccacccggcaccatgggctggtggacagggtgtaccgggagcgtggccggctcggctccccacaccgccggcccctgtcagtggacaaacacggacggcagatatccttttcaccagaggatgagggtgggggccaggccctgtcggtgccggcaggaccccaagtttacccagcaggttctgacagggctgcctgcttccagctctggggacagaatcagggcagcaccatctgggaggcttgatctcagggcagcctgggggacttcctggaggaggctgtgccacaagccctggagcctttggccagacttgggggctcaaggggcacagggaacagctctcaaggcaggagttgaggaaggttatacctgaccacagagggcttagacacctggcagggcagtggggccaggaaggccgtgagcagggagcccacagtcagggctgtgagctgatgaggcctctcctacgcgctgcacggagggcagcccagccaaggcaatggggctaagggggtctgtgtgagacccggacgcatccaagggaggctccatctctgtaagacaggagtaaaattcgcctctgcgactcggtcacgcagagatcagccagagtccccccctcccccccaactcagccgccccttggtgctcagccagccgggccccacaacaccagagtctgagcggcctcaggttgctcccgggatcccccggctctccagaacagagaagcttgttctccggttctcatttccgtgggctgggggagcttgaccagctgggccccagactgagcccttgggccccaggagccaccccgtcagcccaggatggagagtccagaccagggtcagctgaactcagactccacagcgtccccacaggccctactttcacagcccagaaccccctcccttggaaggggtgcagcccgcacgtgtgctcacggagcagagtgctgagtgctaggtggacagggctgtacccctggagagcccctggaacgggggctgcttgtagccaggcaggaaaggccggcaggaaacgccccccgccctactggtcccagctgtttgcaggcctcaggccgaccccagccagccagccggggcttcctgccctgggctgagagtgtgttgttggaggcggggtctcagccagtggcactgcccccttaactcacctcacgccgacagctgcccctatggcaccatgtacctctcaccacccgcggacaccagctggagaaggtcagtggctggacaccccccccccgcccccttcttgttggaaacaaaaccaaactctcatcatggttacatgtggaaaagcaggacacagtcgcttaaacaatgaccaaactaagatgcatccagaagtttctagaaattagccttcaccctgaaacacaggagttccagctttgggaggtcttctaacatttcccttccccccacttatgacaaaaaaaaagacaaaaacaaaagtgggaccaggagtggtggctcaggcctgtaatctcagcactttggggggccgaggcaggcggatcacttgaggtcaggagtttgagaccagcctggccaacatggtgaaaccccgtctctactaaaaatacaaaaatttgccagcatggtggcgcatgcctgtaatccccagctactcaggaggctgaggcgggataattgaacccgggaggcggaggttgcggtgagccaagatcgagccactgcactccagcctgggtgacagagtgagactccatcgcaagaaaaagaaagtgggacgataccgcatattcagcactgtagcttgctctttcctatttaatgctgtattcagagcaggtacccatgttactcaacagccattaaaaatgtgatgataaaattatattaacacatttaggatggaagattaggaaaaatacaggccaggcacagtggctcacgcctgtaatcccagcacttttggagaccaacgcaggcgatcagttgaacccaggagttgaagaccagcctgaacaacatagaaagatcccatctttacaaaaaatgagagaattagccagatgtagtagtgcacgcctgtactcccagctactcgggaggctgaggtgggagaattgcttgagcccaggaggtcaaggctgcagtgagctgtaatcatgccactacagtccagcctgggccacagagcgagaccctgtctccaaggcctaaaataacaataatatagttaatataaaaacatacaataatatagatcatggttgtacaacaatgtgaatgtacttaatgtcacagaactatacactcaaaaacagttaaaactatacatatatacacacatatttacatacatatgtatacaaacgtgtgtgtgtatataattttttttctgagacatggtcacactctgttactgaggctggagtgcaatggcgcgatcacaggtcactgcagcctcgacttcccagactgaatcgtcccacctctgcttccagctgatttttttttttttttttttttttttggagagacaagatcttgccacgttacccaggctggtctcaaactcctgggcccaagtgatccacccatctcggcctcccaaagtgctgggattacaggacatgagccactgtgcctggctgttatatatattttactacaatagaaatatatataacaggcacagtggctcacacctgtaatcccagcactttgggaggccgaggcgggtggatcactagagcttgggaggttgaggatgcagtgagctatgatcatgccactgtacaccagcctggggggcagagtgagaccctgtctcaaaaaaaaaaaaagaaaaaccatatacatacatacacacgcacacacaccacacacatacacacacatgttagtaaacggaagaaaagtaagcaagctgttcaaaatatatatgtatactacaatattaaattctcaccaagcccgtatcataggtcaggccctgttcccaccatcacattcattaacttatataaaatgaatggagctttatggagtgggcagtgtgttcatctccattgtagtccgtgttagacatgaggaaattgagcacagagaggtcaaaacacttgctcagagacacatagctggtggtggctgtacccacattttgcctggcagccaaggaggctttctggggacccactcttgaggcacctgcagccaggagcagattgggtggccttgtgctttctccccatcagttcctagagggaaatgcggtccctggaggtagagggaagagcctctcctgggctagttgaagcaagacctcctgcctcaggttggcttcccaaccacgggggcctctaagtggcttcattccttccggggccttctcctagcccattccacctgtcacactgggtttgtgtgacactgagcatcctagagggcacagtcacctgattgtgtttgtcaccaagaggggacctggtgacagactggaggctcataccccaaggctgggcacctgtggggctccttctttgggaggtttcagcaggagggcactgtcctttccccaaagccaagaagccttgctctgttgcccaggttggtcttgaattcctgggctcaagtgatcctctcacctcagcctcctgtgtcgctgggaccacaggcgtgcgccacctcgcgcggctgctttttgtttttcacgagctttgcagatgaacaccgcagtcactctggtggctctttttagaatgaggtcccgagagctttgctcaggtgcagcagctcacaaaaatgatccacagctgccaccctgtccatccagcgtgtcccagctgggatcaggactatcgcattgtctgccttgggctgaggctcattgtctcttcctccctccccaccaggaccaattctgactccgccctgcaccagagcacaatgacgcccacgcagccagaatcctttagcagtgggtcccaggacgtgcaccagaaaagaggtatggacaggggactcgggtgtctctgctggggtgaggcaagtccagcaggtaacccctgttctccaggaggtcacaagcttgtgggcagatggctcttcaaaggaagactcagaccatgctgagggatcgggggaggggatcggaaactttcagaggtggtgctacttaagttggattttgaagagtgcataggagttttctaggcagagaaaacaaccctgcaggcgcacgttggctcccattcctggattgagggcgtggccatgaagtctgggtgctgcacagatgctggtttcaaatgtagcggcagcaagcccacgcaaaggagcatttgtcagctcatgacagagcaggccaggggtcgacttctagccacaggttcagctccttccactgcttcccactggactgtttcctggctctgctgctgagaactctcctcgcctgcagcccctgggcccgtcctagctatagcgagtgagaaagaggccatctcttcccaactcttggccagagtgtcgcctccagctgagccatgcacacccctgtggcggggacagatctgtacccaggtccttggctccaatttgaagccgggcgtggaggcggcaccctgggaaccttcaaggagggcatatgctgtcttaaaaactggggcggtgccatcagagaagggagcttggaggcttgaggccagccccagggaacctggtgtggcccaaggcactgaagccagggagttgcacgtgcttagggctcacatacctatgcttgtattgctgccgttcaccgagtgggtggttaacacgcaagggagattctgctgataggaggaggaagaggaggaggaggaggactgttggccagaacctcactccggggttccggctcagcgtgcagcagagacgggagggagaagagaatgtctccataatgaaaatgaggcttctggaacacccaggggtgctgaggatagcacagtgcctggggcttccctgctattcctaatgagcaggctgttctgaggctgctgcctgtcctactaggtccccacagacagcacgtccgaggggtgggcaacaggatgtcaccatcccctggaacactgtaacctgggaaaggagctgtgacatgggacccctggtggccttggagtgggggcctggcagggacacatcatctatccccactctcctcggagcgcctgaggtggtgacagggctggggttggcctggctgcctcctcgcagcctggctttcaacaaggaaggggttggcctatctggctgtgctcatcgtgggtctcccagttacaagtaaaaaaaatgaaatgtgcaacaggcataaagaaaatggggaaatgggctgggtgtggtggctcacgcctgcaatcccagcactttgggaggccgaggtgggtggatcacaaggccaggagtttgagaccagcctgggcaacatagtgagactctgtctctaccaaaaatacaaaaaaattaactgggagtgtttgcacgtgcctgtggtaccagccactcgggaggctgaggcaggagggggaattgtttgagcctgggaggtggaagttgcagtgagccaagatcacgccactgcactccagcctgggtgacaaagtgaaaccctatctcaaaagaaaaaagaaaatggggaaatgtttactcttaccttgactgaaagatccaaggaaaggcactttcaggcccggctggttccagagcctcaattgatgcccatccatcccgtcgctcagactctccctctcctcttcttgctctggggctggctgacattgtggctgactcacggggccgctgctgccatgagtgcactggtcccacctccatcagcattgagtgacatgatctgaacccctgtgcttggtgccgggggctcaataaaggttcagccactgggtgtcagcagcccagagcaggaagcaagatcaagtggtggatgcggaacagaacatgcaagctagggccaggcgcggtgggtcatgcctggaatcccaacacttcgggagagaggctgaggtgggcagattgcttgagatcaagagtttgagaccagcctggccaacatggagaaaccccatctctactaaaaatataaaaattagctgggcttggtggcacatgcctataatctgaggctgaggcaggagaatctcttgaacccagtaggcgcaggttgcagtgagccaaggtgccactgcactccagcctgggtgggagagcaagactgtctcaaaaaaaaaaaaaaaaagaaagaaagaaaaatatacacacaagctaggcagctgctcttgggagagattcttggctgttctctgtagcctgacgcctctgaggcccacgttggttcagcctcttctgtgggaagcagaatccacacatcctcaggctccagagctgctgttttatattattttattttagagacagggtcttgctctgtcacacaggctggagcgccatggcatgatcacaactcgctgcagcctctacctctcaggctcaagcgagccctccacctcagcctctcgcatagctgggactacaggtgagcaccaccacacccggccaactttcttattttttgtagaggtgaggttttgccatgttgcccagggcagtctcaaactcctgagctcaagtaatctgcctgcctcggcctcccaaagtgctgtaattacaggtgtgagccactgtgtccagccttgtttctctttgtctctctttctttctttttttttttttgaaacagagtttcactctgtcgcccagactggagtgcaatggcgtgatgtcagctcactgcaacctctgcctccccggttcaagcaattctgcctcagcctcccaagtagctgggattacgagtcctgacccctatgcccggccaatttttgtatttttagtagagacaggatttcgccacgttggccaggctggtctcaaactcctaacctcgggcgatctgcccacctcagcctcccaaagtgctgggattacaggcgtgagccaccacgcccagcctattttttcttaagtcacagattctctgacttatttaaagctgataggcggggcacggtggcgcacacctgtaatcccagcactttgggaggccaaggcgggcggatcatgaggtcaggagatcgagaccatcctggctaacacagtgaaaccccgtctctactaaaaataaaaaaaataaaaaaaaaattagcctggcatcgtggcgggcacctgtagtcccagctacttgggaggctgaggcaggagaatggcgtgaacccgggaggtggagcttgcagtgagctgagattgtgccactgcactccagcctgggcgacagagcgagactccgtctctaaataaataaataaataaataaataaataaataaagttgttgttgtttgtcatgaagcccttttttgtggttttagtacagtccacagaagttcccgttaggacagttgcagtcttaccatggccatgactccgtgtgtcagggacgtgtcctcctggtaccaccatgcggctgcaaagaaatttcttctctgattctccttctccccctcccacctccccagtcttactgttaacagtcccaggaatggaagagaccacatcagaggcagacaaaaacctttccaagcaagcatgggacaccaagaaggtaagagcctatgagctttcaaaaactttttttcttctttctcttctcaagcatcacctgggcaaaggtgacaaaatggcaggttggggtggcttcaccttcccaagacagggaacctcactccgatttttccatcttcaaattcagagaatctgttaggtctgttgatcactaagatcactaacagcaggccttatccaacaggccggaactgcacaaaaattacaacccaggctgggtgcggtggctcacacctgtaatcccagtactttgggaggccgaggcaggcggattgccagaggtcaggagttcaagaccagcctggccaacatggtgaaaccctgtctctactaaaaatacaaaaaattagctgggtatggtagtgcacgcctgtaatcccagctacttgggagactgaggtgggagaatcgtttgaaacctggaggcagaggttgcactgagccgagattgtgccattgcactcccgcctgggcaacagagcaagactccatctcaaaaaaaaaaaaaaaaaagaattaaaacccgttgctggtcaagttgcactgaaagggacagcaatgcaaattactcctcccctatgggaaagtgaggcaccagcctgtgccaaaatcctttcaaaagggtttgctccaggctgtgcatggctcacgcctgtcatcccagcactttcggaggaggctgaggtgggaggattacttgagctcaggagtttgggagcagcctggtcaacaaagtgagaccctgcctctacaaaaaatgagccaggggtggtgatgtgtacctgtactctgagctactcaggagggtgaggcgggagtatcacttgagcccaggaggtcaagactgcagtgagctatgactataccattgcactccaccctggacaatagagcaagaccccttctggtggggaaaaaaaaatatttgctccaataatttcttcttcaggaattcaatcattgagagttgaggaatgaataaggaacaatgtgttttttaaaggtattttccagagcttttgcaataaactagaaacagcctgcacatttcaggagtaaggaatttgttgaggaaatagtcttcagtccctcgaggagataagattctgaagaaattttaaactcatgagagacactcctgatactattgtcatgtggacagagtaggataagaatattggaaaaggcataaaacttgcagagatgcagctgcacagataccagcaggcagacctgactgaggggcgtctcacaagggttgtgcgttttctgtcgtggtgagtgtgggtggtgctgtcagccctttatatccatctgtgtatttctttttcttttcttttatttttatttttaaattttattatatttattttaattatttttattttatttttttgagaaagagtctcactctgttgcccaggctggagtgcagtggtgtgatctcggctcactgcaacctctgcctcccgggttcaagcgaagtgattctcctgcctcagcctcccgagtagttggggtcacaggcgtgtgccaccacacctggctaatttttgtatttttggtagaaacagggtttcaccatgttggccaggctggtctcaaactcctgacctcaagtgatctgcccgccttggcctcccaaagtgctgggatgacaggctcttttttttagaaatagggtctctcttatgcctaggcaagagtgcagtggtgccaccctagctcactgcagccttggagtcctggacttaaacagtcctctgcctcagcttccagagtagctgggactacaggtgcatgccaccatgcctgacaaatttttgtattttttgtttttttgaggcaggatcttgctctgttgcccatgctggagtgcaatggtaggaacacggttcactgcagcctcaacctcccgggctcaggcgatcctcctgcctcagcctcctgtgatgctgggactataggagcgtgccaccaaacctggctttttttttttttttttttttttttctgagatggagtttcactctttcgcccaggctggagtgcagtggcgcaatctgggctcactgcaacctccgtcccccaggttcaagtgattcttctgcctcagcctcccgagtagctgggattacaggtgtgagctaccgtgcccggccaatttttaaatcatttatagagacaggagcttacttcgttgcccaggctggtctcgaactcctgggctcaagcagtcctctgcctcagcctcccaaagtgctgagattacaggcatgagccacctcgcctggcctattttttaatttttgttaaagacgggggtctcactatgttgcccaggttagtctcaaactcctgggctcggtctctgtgtttcagtttggcacaaagagtcactgagatttccactcttacgggaaaaaaactttaaaaaagaaccctaggccaggtgcagtggcttacgcctgtaatcccagcactttgggaggccgaggctggtggatcacctgaggtcaggggtttgacaccagcctcgacaacatggtaaaatcccgtttctactaaatacaaaaaattagccaggtgtggtggcacttgcctgtaatctcagctacttgggaggttgggacaggagaattgcttgaacccgggaggcagaggttgcagtgagctgagactgcgccactgcactccagcctgggcaccaagagcgaaaactccatctcaaaaaaaaaaaaaaaaaaaaactctaggctggacggacacagtggctcgtgcctgtaatctcaacactttgggaggctgaggtgggaggattgcttgagcccaagagtttgagaccagcgtgggcaacatactgagacctggtctctgcaaaacattttaaaacagttagctagtgtgatatgtgtgtgtgcctgctacttgggaggcaggaggatcacttgagcccaggagcccaggagttcaagtccagcctgggcaacagagcaagaccctgtctctaaaaaaaaaaaaattctaacaacaaacaaaacaagaaaacaaatgtccagcagcagagaggtgggtaagtaggccacggtccacccacacagctggatgttctgccgttactcaagaaaaggaagatggcgacagtcaccttgcagagggagacacaccccgatagtggagtggggtggtgggtgaatttttaatactgctcagaaatccattaatgtctccataatgttggtggaatgcttttcaaagtattcttgagaacgtgatcgccggtgtgctttgcagaaatccggtaatgaagcgaatgtttactctcagaatgaaggaggctctggccaagcagaaacccattcagccggcgttctccacagaggcttaacacccgccggtcgcacgccacccctcgggcaccccagtggctgcgggttgggcattgccccctcacggtgtgtgcattttgaggccagccccaccctctgccagcatgttcgcctttttcatctgataatcctgaaagaactcagccagaagtgtttgccccagggccccaggggcggaaacgtgtcacactgggaggcctcatccatggctggggttctgtctggtcatgcctgccaagagcagaagacggtcctgcctttgtccttgaacaggagtctcgggggcccctacctggagcctgtagttccccagggcctgcagtgatcccatgtcttggctggtgttagtgcccccaactcacaggggaggaaacattggtcctccaggaaggttttcctgggcaccccctccccagggccaactcaccggcctctgtctgtgagcggtgggggcttggaggctgccctgctaccctacggtgtcctcacagccagagccagaccccaccctgcctcagaagcccttggaggtacccggcaggtctttctgctgggattatgattttctttcccattgctgtgaaagtccatacttcagtccgggtgccatggctcacgcctgtaatcccaacactttgggaggctgaggcaggaggatcactggagcctaggagtttgaggccagcctggacaacacggtgagcctcatctcttaaaaaaaaattaaaaaataaaaattaggctgggtgcagtggctcacgcctgtaatcccagcactttgggaggctgaggtggacagatcatgaggtcaggagatcgagaccatcctggctaacatggtgaaaccccgtctctactaaaaatacaaaaaaaattagccgggcgtggtggcgggtgcctgtagtcccagctactcgggaggctgaggcaggagaaaggcgtgaacctgggaggtggagcttgcagtgagccgagatcgtgccactgcactccagcctgggcgacagagccagactctgtctcaaaaaattaaataaaaataaaaaattaaaactaaaattaaacatttttttaaaaggcggaagaggccaggcaccgtggctcatgcctgtaatcccagcactttgggggccgaggtgggcggatcatgaggtcaggagatggagaccctcctggctaacacggtgaaaccccgtctctactaaaaatacaaaaattagccgggcttggtggcgggcacctgtagtcccagctacgcgagacactgaggcaggagaatggggtgaacccgggaggcggagcttgcagtgagctgagatcgtgccactgcactccagcctgagagacagagtgagactccgtctctaaaaaaaaaaaaaaagaaagaaaaaaaaggcagaggagcccttcccgagaccctgaacttcaaaggctctgtgggccacagtccaagaggagcctattgtgggccctttccatacaccatgtccatgtcccgaaagtgtcctgacagtgctcctcagccaagcagaaaaaccagtgtcatgctgagggctacccaagccctagtcagtgggggatgagtgtggctgcccacatagcagagggacgtctcgggactctcaggaagtagcagaccctgagggtccccggggaagtcacatgtctaggtctctgctgcaaagctggtcagccccaagacaggggcagtgacctctgaactgagtttagggcatcaggtccaagcttcctgggtctcccctgactcagttcttccctcctttgggccttgggcttgattcactccctggagactggtggctgctcacaaacttgcctggtgggcactggacagaggcaactcctgcccccggaacccctgccaccatgatctgggaacagcatggatggttggggacagctctagggacacttagcctcgggtaccagggcttagggcggccagcttagcagaggcccctctactgtgctggctgctgactgctgtggtacagcgttgggagtgtcaagaggcgctttacacaaaatttaaaaagcagccgggcgcagtgcagtgacgcgtgcctatggtcccagccactcgggaggctgaggcgggaagatcatgagctcaggaggttgaggctgcggcgagctgtgatcacaccactgcactctagcctgggtgacaaagtgagatcctgtctctatgaaatagaataaaaatttaaaaagatccacatgccatgttctccccagactcctctgaaaagagactgcccactgagggcaggagcagggggaggggacccatagggagaccctctctgtgcaactcttggcttcgcgctgggcatgtctggggcccgcccctccaccctggggcggtgcccctgtcctccatctgtggggctctgcggccccagcaagcttggttctcatgatgcatctctgggctttgtgggaagatcagccgtttcaaggaggcccagtgcccaggaggagggccccacagggtgtgccccagggctcaggctctcctgtcttctctttcagacggggtccaggcccaagtcctgtgaggtccccggaatcaagtaagtctccacagggcccaccccgcacactgcatctgctgcgctgctccgtccaccctggggcattctgtccactctcttgaggttgcaagtccctgcaagagggacactgtgtgaccagaggccagtgacagagcccccacatgcccacccctcaggcacctcattcccagggatgatgccctctcctgggttcagggaggttgctgcccccaggccccccaccgtcctcaccgggtgataggctgctttccaaggtctcagcctggtgccagccaacagtggtttcccaagcacacggcacctgatggggggtggccttttgcacccgctgattttctcccgccagccccctgtccccgccgccagccccgccccatgagctcacctcctgcctgcctctggccttttcccagcatcttcccgtctgccgaccaggaaaacactacagccctgatccccgccacccacaacacaggggggtccctgcccgacctgaccaacatccacttcccctccccgctcccgaccccgctggaccccgaggagcccaccttccctgcactgagcagctccagcagcaccggcaacctcgcggccaacctgacgcacctgggcatcggtggcgccggccagggtaaggcagggacactccgccctcggacagagcactggcttgtggagacaacacgggcatctgcaggatgacttggcagagtcccgttccaaatactagggcatgggggacagggctggggggcggccgacaggctgacccagcgggcacaggcatcccaggtaggggtggggcctgggtacaggcctggtggaaaggagtgcctggtgcccccagacaccagacagtgggtttgagggtgtgtgatggtgctttggggagtccaggagggaagccctgggagttttaacgcagctggggtgggccaggccttccctccgcccctcctcgaccccagcccctcattggggggcgggaccaggcctgacctgcttcctccacccgacatctgacagtgaccacctacttgtcacatcccagcaccaccacccccacccgtctccagctccacactcctttcttcctcagccacatccacagggacgtcgcacaggcccctcgcccgtcccaatagctcctggcgctgctgccgccctgctcccccgggacccccctcctgtggctgcactgattgcagaggtgtcccccaactcctctgtcctttcccagacatggacctgacccattgtcagcgtgtcctgtcggttccgccctcaggacctggcctgacctggctcctctccccaggcccccagccccctccccacctagaacagccaccagccatggcttcctccacttgggacctcgcacggcccccagctccctctcagtgaaagcctgaggcctccagggtctgggatgtccaccctggcccaccctccaccctctgaacttagccccagtcccacctcagggcctctgcacatgtagtccttcctctccaggaggctgcaggcctccctccctcccctgccctgccctgccctggtcagagctagtccccttggcaaggccgtcccggccctggcctctactgccgcgttgctttcctgcacccctgccctggcccacgttgctgctccgtccttagctgttgcctgcgtccccattggctgtgcagtgtgtgacctgcatcccgggggtggcaggcacctggcttccaaggaggagaaatggcgtggccccaactagtcctggggggtgggacaggctggaggggctgtgggggatgcactgggggtgggggtgacagacgccaccttgctgtgctctgtcttgccccagagctggagaatgaaccggccccggcccactccaccagcccatcctgcctctgccccaggcttggaaggcagcaccaggcagggctttctatgagatagtcacatgcttacatttgtaactggcggagtccccctggctgccctggaagaaggagcttttgggaggggcggccactggagcaggacagcaccccaattgggggctctgcctggagactccagggtgaaattggccagcctgggagctgggttgatgcagggagtgaaggagagggaggagcctggaggcgttcctggctttggtgccagcagggccaggggcaggcaaggggcgtggagggtggcgtgaatgttcctgggttttttggaggagggcatggggactagaatagtgaagagggaacagggccccagcccgagcgcattgaggctgcattctgactcccacacctgggccctgggccctgggcccgcggggctctgccactggacagagggcaccagagaaggcccagaaaacacagccgattcggaggagccctcttcattgtctccagatagacagggccaggcaggcggcatccacacgcacctgcgcagaaccagaaagctgaaggtcagcgctggggctgcaggtacccctgccccgcatagaagccaccatctcccagcccctgcttttcccctcacatctcttcacggccaccagagcacatggcccccttcccgctggagggtccttggcaggtccccagcgcccgcccgggagctgcgcacctccagcaggcacccagtctaaacaagcacaaggaaacacacaacatacgtggaagctggagccggcgctggccagagcggcccggtaatgcctgacatgtgttgggttgtttgtgaacctgccgcccaagcagctcgcctggcaggggctttgctttctggacgccttttaaatcaagccgagctgccggcccctggcacacacgaaggtggccccctccctcctcgcaagcccacccgccagtcagaacgtgagctccctcaggaaggaagacagaggccttcgcggccgaggagacagtaccccgcttggctccatctacatttcccatatccctggctgctttccagagtgcaggaggagggcaggccctggctcctccttcctggcccagctttgaggccgggcgggccctgacacctggcccgccctcccctggcagctctccctgcccgctccagacttcccctccagctggctctgtgcctgttcccaaaggtgagccaggttgccaaaaggaattcaacagcaaggctcccgtccgccctcctgggccaactggcctctccaggggtggccgagagctcactttgcagccagtggaagattaaaaactcccttgtattcagggcagacattagagactggcagcccaagggccaaatccagcccatggtatgtttcgtgtgggcccacagttgtgcatctgtaatacagccacacgccacatcttgacgtttctgacaacagcaaaccacataatcggcagtggccccatcagagtataatgctgtgtcttactgctccttttctaggcttagacacacaagtccttaccattgtgctacagttgcctactgtttttaattttttttttcttttttttgagacaaagtctcactctgtcacccaggctggagtgcagtggtgtgatctcggctcactgcaaccttcgcctcccagtcccaagcgattctcctacgtcaacctcccgagtagctgggagtacaggcgcccaccaccacgcctggctaatttttgtatttttagtagatacggggtttcaccacattggccaggccaatctcaaactcctgccctcaggtgatccgcctgcctcagcctcccaaagtgctgggattacaggcgtgagccactgtgcctggccgacggtattcaggacggtcaccctgtacaggtttgtagcctgggaacaagggccctaccgtctggccgaggtgtgcagaggctctgccatccaggtttgtgtaagttgccctgtgatcctcatgcacagccatgaaatcgccggacaacgcgttttttcagaagtcacccccattgttaagtgatgcttgactgtacttagaatcaacattgaaaaaccaggggaatgcccgtagaacaccagatttctggctgctcttgaagaatcagacagcccagtggccatggccgatgtcttgcacctcgagacgggccacagtgctctggtttgcctcaggccccacccgcccctgtcgtcccacatccataccctcacacgctcctgacgtttgcccctactttgtaccgagcccgacctctgcttctgacctgggcactgagcatctctcggcctgctggacgcacgaagtggcggacactcaggagaagatgagggagtggcccagggtcgtgactctgagtgtgctctgagcaggcttcccccacatcctcccgtccaggcctctgttgatgcctccctggacgccagggcctgcaaagggcgcttgctgcctggggagcagtcaacagcaccaggcttcctcccacagtgcgcagccaagcagagctgccagggcatccgaggggaagtgcaggcgtgaccgagctcgccccggtgagcagctgccctgggcacggacaaggctgtcatctcccctcggcgcttgtcgggtgtgttcccatgggcccacgcacccgccgtctcatctgccggaacaaggttaatctggtgcccagatctcctggggtgagtcaggcggcttcacccccgccttgactgcaggccagatgctcttcagagactgctcctgacctcaccagggcctcactttgaaccggagagggcggctgttatcgtcgccatctcaccaaccagggaaccaagtctccagagtggatgggggtcaggccaggctcgcaggggtcctcctgccatcgaggggcctgttgcctgcctggcatggtgcccacaataacccagccagccccagctactgccatgttgaacttgacctcacccagcttcatcactgcagcagaatccaaggattgggttgctcagtgcaagggccttcggggccggggtgagggaaggggtgatgaggcggctcctggcaggacctccagcaggaatgatgtgtcagaccccagggcagagagggggaaggatgttaaggagtgacattctttagttcagacagcctgatgggtggcactgcagcttggggaatgcaccaggtctggggaggaggaagtggctgtgggacataggggatagcaggtgctcaggtctgggggccaagagaagcagctgcaggaatgggcacattcactgaaggagggcaagatccacgaggtggtgggcaaaaccacagcattgggcagggcctgctggcttgaagctaaccacaacccaagccattttcagccaaaaaaaaccatttattgtctcctgaaagtgggaagcaggctcagatgctgcctctcccctgcagcccttcagctggctcctcacctcgccacaggatgccccacacacggcttcagacagcccttcctggaattccatccaaagcccctgggaaggctctcattgggccagcctggttacatgcccatctgggggccaatcttatgctccagagatggggatgtgctggttggctggctgtgagacacccccttcctggaaggaaggagaacagactctgcaggactgtgggaccctcgggtcaggaatcagggccttcggggggtgcccaggtttggcagttgggacatgtccatgggcttctgtctgagcagttgagctattcccatgcagtgtgactgtgggtgtgtaagcagccctttctcagtgatcagtctcacacctgctctccctccctcctacttcctctctaggaatgagcacacctggctcctctccacagcaccgcccagctggcgtcagccccctgtccctgagcacagaggcaaggcgtcagcaggcatcgcccaccctgtccccgctgtcacccatcactcaggtgcgagggcaaggtggggggcaggtgggagggggaaagggaaaggtggaggcctggctctacctcttagaaggcctcctgttccttccaggaggccacaaaaccttgagaatgctcccaacacttttagtttttattatcaaattttcaagccgggtgccgtagctcatgcctgtaatcccagcactttgggaggctgaggcgggtggatcagttgaggtcaggagttcgagaccagcctggccaacatggtgaaacctcgtctctacaaaaaatacaaaaattagctgggcatggtggtgtgcgcctgtggtcccagctactagggaggctaagatgagaggatcacttgagcccagggggtggaggctgcagtgagccatgatcacaccactgcactctaccctgggagacagagtgagactctgtttcaaaaaaaaagaaaaaactcaagaggttagcttttgatttttcaatttgctgtatttgcttgtctacttttttgggtagtttgtatgtgtctaggaatttgtccatttcgtctttgctatccaacttgatggcagaaaatttttcataatactcttttgtaatcctttttttttttttttaagacgaagttttgctctgtagcccaggctggagtgcagtggcatgatctcggctcacggcaaccttgcttcctgggttcaagccattcacctgcctcagccttccaagtagctgggactacaggcatgtgctaccatgcctggctaattttttttttttttttttttttggtatttttagtagagatggggtttcaccatgctggccaggctggtctcgaactcctgacttcaagtgatctgcctcctttggcctccaaaagtgctgggattacagatgtgagccaccgcgcctgaccgtaatcccttttttaaaaaaatttttgagacagagtctcgctctgtcacccagggtggagtgcagtggcgtgatcttggttcattgcaactctgcctcccaatttcaagcaattcttgtgcctcagccacctgagtagctgggattacaggtgaccgccaccacgcctggctaattaaaaaaaataataatagagatggggttttgccatgttggccaggctggtctcgaactcctggcctcaggcaatctgcccacctcggcctcccaaagtgctgggactataggcgtgagccaccacacccagccttgtaatcctttttatttacgtaaagttggtagcaaagttcccattttcattttctgattttagtaatttgaatcttccctcttttttacctaatcaatgcagcttcatagaatgagttaggaatgttcacttctcttctattttttggaagtatttttaattcctctttaaaagtttggtaaaattaggcgggtgtaatggtaaattcctgtagtcccaggtttggtaaaattcaccagtgcagccacctgtgtcttagctcaaatgtgttgggaagtttccaatctcatctccttcttataaggctattcaggttttctgttttttcttgagtcagttttggtcatttgtgcatttctagaaatttatccattttgtctttttaaaaacaaaacaaaaaaaccctaacagagaactttgacatttttaaaatttttttattttttaattttaatttaattttttttttgagacagagtctcactctgtcgcccaggctggagtgcagtggcgtgctcttggctctcctgcagcctctgcctcccaggttcaagcgattttcgtgctagcctcccaagtagctgggattacaggcatgtgcctaccatgcccagctgagttttgtatttttagtagagacagagtttcgtcttgttgaccaggctggtctcaaactcccaacctcaagtgatcaccctgtctcagctttccgaagtgctgggattgcaggtgtgagccaccgcgcccgtcacttgtttgtttttaatgtaaccacagtggcattgtccacctacaacgaagttaatggtagttccttggtacctggcaatgcccggcccggactccatttctccccgcccctcggcccccatgtctcctgtctgcttacaaaggtgtcttattcagatcaagatccagacagagctgtgggcgctggctcctggcagctgtgtcttcagccactttgtgagctaggctgtcttaatctgacacctgccccttccctctatctggaaactcctttctcttcacaaatgacccactggtcctcagaggccgggcatcctgctaagtggtttttgttccatagctcctgggcacgctcagcctttcttagagggcagggaccccacctttcccaaggactgtcagcttggtagcccctggctgtgagtttccacacagacagtgaacgtcacacacttccctcttattgattttcctctttccagctctgcgaaggcctgagccagcccttggtgaggggccatgctggtatctccagcaaccccagcctctccagcatccccagagtgggcaaggctttgggcgggggggtttgggaaggcaaggccagtggatcacttgaggtttccccgcagcacccacaggggctgggagctggctgctcactgagccaccagggatggccatcctgggcttgccctgcagctggtggactggcctgagctgcacggcatgtagtgcgggtgcaggcacaacaagctggaggaggtcaggtcctgcccagctccagctgacccccttggggccctgcgtgaggcccaccctctctagcctgggctccctcatcgtgaggagcacccagcccaggggctgcctgtgatcacagggcccttccacctcgcctgctgagcatgccaggctatgggggcccgagggggccaggcgctgacaaccagggcccgccctgcctgacgctctcctctcctgcaggctgtagccatggacgccctgtctctggagcagcagctgccctacgccttcttcacccaggcgggctcccagcagccaccgccgcagccccagcccccgccgcctcctccacccgcgtcccagcagccaccacccccgccacccccacaggcgcccgtccgcctgccccctggtggccccctgttgcccagcgccagcctgactcgtgggccacagccgcccccgcttgcagtcacggtaccgtcctctctcccccagtcccccccagagaaccctggccagccatcgatggggatcgacatcgcctcggtaagcccagggtggggtccctcggggcctgactgggggtcttgtagaggacagcccgggggctgcagaacagtcgggttacctgctgcatgggccaggggtcagaaccccagcgaacgctgcctgggcccacctctccacggggctaccccttggaatcaaactgagactgtcactccctgtagagatggagaaactgaggcacgagcaggtggctggccccagattccacccaaggtgggccaccccatgtttaactgccgagcaccccttcttggcctctctggcccctcccacctgaagccaggcttcctaggaggcaagaagagtacggcgttctcagggccagggcgcaggccgggggccggggatgacgtgagcttatcagagaaggaaagacgaggccagtccaagaggcggcagcccgttgggcacagcgcctggggcccagggctgggggctgcagctcagaccattggacttttctgcctagggccggctcaggcagacaaaggctgggctttaaccctgtacccacaaaccttcctgactgtccagaccacctgcttgctccagcggcgcgggctgggtggcaaacagctgcattgggccacatccagggaaacagggacttgtgttccgggcacaatgagtcctcccacttgaccccgactgccagccccaggctaaatgtcctccaaacattgtgtgctctgcaaagaacagccgcctgagctgggtggggcaggcaggtgagcctgtgggtagacacccatgttcccaagctgctctgacctcacggaggggaccacccacggcccctgggtggaagagtgcccaagtcctttctttggtggaaacacagcaggtcctgggggaggctcccaaggtggggcctcgccttggagctgggtggttcttggagtcacagggtgtctgggccaggtgcagggacggcccttctagggctcttgggtcaggctgtccatgtccagcaccctcacacaacaaagacggcttcctgcccccacttcaaggacttctagcctcctggggttgaggggggactcttgagtttttgcacagactcacccaaatgagaatctccctctgatccctttgtcctttccaactccaggaaggcccaagtcagccatccctaagtaacagtgctggcacctccatcacccacgcaggcgagctcaccgccaccccccgccctaccccaccccgccccacctggactcaagccctaccccaaactgcccagaaggcgccaccaaggacatgggggagacagcaattataggccctggaccggtcaggctgggcctcattcagtgactggctcagacaggtcaggcaagttgtctgcaggcacacagcatggctgggccgtgctaggacaagagagtggtctgaatccggggcctggcctggcccgacctgcctctgaaagttctgggtcatagcagtgagatgcccgggcctttcgtccctcgagcaggtggaggaagtgactgccccttgcaggtctcagatggcataacccaggcaggtttgtcctgcagcagggcagggatagtgactgcgccatgctgggagcctgggctaccagcaagatggccttcactcagtccccacccccagaggtgggccagacctgctgggctgcagacttaggggcttagagagccaggggacctgcccagggcacacagtcagcgagagccgggaacaggaggcagccttgggttttccctgcccatggcggtgtgtgtgtgtgggttgtgggtgtgcacaagtgggtgggtgcgggtgtatgtggtgtgcacctgcatgggtgtgcatgcatgtgaatgtgtgtgcatgtgtgcatgcgtgggtatgtacatttgtggatgtgtggacatttgtggatatgtggacatttgtgtgtggatatgtgtgcttgtgtgggtgtgtgcacacggtgtgtacattttggtgtgtgaatatatgtgtgtgtgggtgtgtacatgcgtgggtgtgtccatgtgggtgtgggtgtgcatgtgggtgtgggtgtgcatgcgtgggtgtgtacatttgtgtgcatgtgtgcatttgtgggtatgtacgtttgtgtgtggatgtgtgcctgtgtgtgtgcatttgtgggtgtgagtatgcgtgtgtgtgcatgtgtgggtgtgcatgcatgggcatgtacattcatgtgtggatatgtgcacatgtgtgggtgtgcatgtgtgggtatgtatattctagtgtggatatgtgtacacgtgggtatgtctgtgtgggtgtgcatgcatgagagtgcacacgttgctatatggctctgagcctgctgagtcagggccaaccctctgatcaccctcctgtagctccaagaaggagggcagttattcaccctccacgccgttccttcctgggttcgggggcagctccccggaggctcaggtacccacctttcctgcaggtgtccaggctcctctgcctaccagtggggtggcgaccatcaccaaggtgtgaggggcggggggacctgcctgggggctgatcaggctgctcccgggaagcagggactggagcccgggcttgggcagctgggctgcggcgtgctgatctgtctgtcatcgcaggcgccggctctgcagcagtaccgcactagcgccggctccccggccaaccagtctcccacctcgccagtctccaatcaaggcttctccccagggagctccccgcaagtaaggggcgccgcctcccccttggcctgtgggctccacgcttgtcttgttcatgccccgtgtgttccctgcccactgtctgtcctcatgcatcgctcctcatgcatgtcctcatgcatcccatcccgtccacgccatcggacctgagctgtgcacctaccaggctgcaccagggcaggaaccccacagggtccttcccaggagccgccagagcctgcctctgctgaacactaggtgggggtgtgcgttagtgacattagcgatggctgtggccctgcctggatgtcctcattgagtggcccagggacaatgccctccacacccagtgtgtcacccagagcatgagctggagctttagggacccccccgacttgggggtgcagctgaggtggctggcccgcccgcagggaaggcgctgactctgcagccctgctttccccttcaccccataggcagctgtgtttctccagaaccactggcccaggaggcttctctgagccgctctgcagtgtctcagggcccttgtccccattccacagacgggagactgaggtcagcctcaaacctcacccatcagccctgggttttcctgttgcacccagcaccgtaggaccctggcttgctcacgccccagccactccaaggttcaggttcctcggaatgccccttcgttctgcctggccagtggaagcggccagcctggctccccactcagcctcctcctgttgtactttgacatcaggtgtggccagtagaccccacattccatctagaacatttgtccgggagaaggggtgcccacaaggccaacatccagccgccaactttttttaccctggcagcagagcctccccagaaccccgctatcctgggaccatctcatccctgaaatttcaccaagctgagaaacccctagcagccactgctgtgcccggggccctgaagccatccctgtcccctgtagaggggatgctctcgtcctacttcccagctagataaaagagtcgctcctccagggctgaggtcgggctcccttgtcccagggcaaaccgtgagcgccacagacaaggacagtgaagcccctctgcccccatctccagctctcacacgtgtatagggacatctgccccatcagccaagggccgtctgggaccactgcctgtagccccgtgttctggaggcaagttggtgggcagcagtggtctcggggaggcatgggggtcagcctggtgtctgcgcatgcttggtctgcccgcactggctctctgagctctcgggctctggcagcgtgtctggtctcgtcgtgtggtactgttggggatggggctggaggggctggagaagcggcaggtgaggcctgtcccaggtgggcagcccaggtggggctggttcctgagtgaggtccctcttgcatgtgagacaggacgggacaggaattaggagtcgagccagtttctctcaggagagagtcactggaatggttggtgaatttttgggccccaagccaaagcgggttagtctgctgggcagcgagcaggtggcggtgttgtcaagcccatgtctgtgtgtctggtgtccgtcgtgcgctgatgcaggaggcaggcggctcatggaggtatagggacatcagtacggggctctcaggggcagatggttctaggtggagccgagacctgccttccctctgcactgggtctccgaggactcacccatcggtcccacaggcccagaccaccccacacctgctgtgtcctgccttgagtagccactgtgtgcaccctagccaggccctgggccacaggcagctaccatttggtccagtttgtggctctctcccaacttcaagctcacctttctggcaagccctcatggcaggctcacagggaaacctcagcctgtgttcccctgtgtatgccaggcctttttgagcccaagccctcagggacaggatcaggcgctgtcctggaagcctggtcccaccccacaccccgagccccaggacagacccagcttcagaccagctctacgacagccaggacattacctattgcctgcctgcctccctcgcctcgggcaaaccaagccgcaagcttgcggtccttgtttccaaaacctgaagccgttgatttttagggccaagatagcatttttgccacacgtgctggccttcccttccttgggtcacctttttacctcttctctggcgtttgagtgggacgtccaacctcacaagcctcctcgccccagggtgagcgtgtctgtctctgttgtctgcccactgaccaccaggagcaactggtgggtttgtggccggcccctctctgggattgaggccagagactcaggcgttgggatcttcctggaacaaaggggatctctctagaacaaagctcagatggggagctccaagggagagggccagggctttgggtctgtggagacattcacctggacgccttatagggcacatgccttacgctatagctctgagaatggctgtggggcagtggcttcctggggacactagccagagctcccagccccctggatgctgccaggcctccagcagccacaaggtcacactgcagctggggttcccgaggcctcgtccacggccaccccctcctcgcctccacaccccagccagacctcatcccaccatctcttggggaggggctccgagtgtctcctttctagcgtctccaccacccataaggtcccctagccccctgctcctgtcaagggacagcccctgtcaccctgcctctgagagccctgctggcctcagatagcaggagtagggccccgggtcctgcaggctggcagccctgggcaggggctctccctgtgcctgtcctgtgctctctcagctggtggctggctctgtgcgcccatcctgtccatgtacgtggcctgcgtcgtgtcctttgtctcctgtcaggagtcaccaagtgcactttctgtcctgaatgtaacgtctgggcacttcccgccttggccctggtgacaggttctcctctggggcctgttgggtgggggttcctcatccctgtggcccccaacttccctgtgatggagatagaggctgccttacccaggcttgaggagaggagatggggatggggccttgggaaggggctttcgggttgcagaggcctcccaggagcaggtggcagaaaaaaagtcatccaggattggggggcacttctggaaccccaaaataagcatcatcatcagcctcctgccgtctgggaggttccaggggcctcttgtcttccagccgggcttgggaggtgccgacttcccacctggcctcaggccgtgaccacagcaggcctctcttctgtctgcagcacacttccaccctgggcagcgtgtttggggacgcgtactatgagcagcagatggcggccaggcaggccaatgctctgtcccaccaggtgagcgggcgcccaggctgccagccggccggtgcccaggacagatgcttgctgggaccctcgctgggacccgggccttgcgagtcagagctgcacgtgctcggggggcccgtgcctgcccctcagctttgcccctcggcccccgccccgtcccatctgcgggctatggaggctgagtccccggcaggggtggcctagcgctgcctcccctggcatctttgcccacctacagagcggaggccgagggcagagggtgagggggggcaggcagcaaacgccgggccagacagggatgggaccgtggctgtggacgcggcgcctcggcatggaccgtgcacgcgggtttgccgggaggtcgtgctggctttgcgtggaggccaggatcgggggcatccagggggcttggtggcagcctggagctgctcactcatttgctcatccattcatccattcatccagccagtctctagggtggcggggaggccccaggtggcgggtggagtggggttcgtgcttggcagcctgggtgccgagcatcctgcagggacagagtccccagctgcgggcaggacagccacagcagccaagggcttggggtggccagctgggcaggcccgcggtggccctcacagcctggtgtgcctcccttcccagctggagcagttcaacatgatggagaacgccatcagctccagcagcctgtacagcccgggctccacactcaactactcgcaggcggccatgatgggcctcacgggcagccacgggagcctgccggactcgcagcaactgggatacgccagccacagtggcatccccaacatcatcctcacaggtgaggccaggccgggggcgcgtgtgcggcgccccaaggggcctcagcccgtgcggagacagccagagactgctgtcccgcagcaggagggttgacagggccggggttgtgacccaagcttgatgggggcctgaggaggccacaccccctctcccctgaatttgactcactcctgggcttcgggccaggccaggccagggagatgcctctggaccagacgtcccgtgcataggatagagacggtcactctcccctctcggcggcctcctgtctggccaagcagcccgggtaaaggtgaagcagccgggtacacggtgcccactgcccaggccactgacctgtcagctgaatgtgcaccagggtcagggacggctgtggggtgggccctgtctggtgagcccagcctgggcagccagctaacaggtcagggccgtgatgcaccgtgacaaccacgcccaagcagtctgagcacggcgcctgggctcctggggacaagccagccccgtcctgcatggcacatatcaggaagacccggctccatctagcacagaacccagaccctgtctccctgctgaagaagatgattcccttatgagtcagggctgctggattgagggtgatgcgccccctggcagtcctcactggcctcttccaggctggaagtgtccgtatttagtgctcccccactgtggcctgggctctgagtgcagaatccagcacctccttcccacccctcgggtgtaggcagcagttgacgagaaattcaagggtggacgcgccagcctcagactcaggagaagaatcagaatctgacccccgcaatggcctcaagagcccagaaagacagggcgtttcagccccatttctcagacctggaacctgagtgtaggtggaagcctaggtttgaacccgggtctttgtgggggaactgaggattccctccagccctagcagcagctgggtccccacagtcactccagcctgcttctcagtgactcgtgccgagcagccctcatggctgagggagccggggaggtccctgccctcgccaggtcatgctgacgtgcatcagtgacacagcccttggcccgaggcttctccttggtgctcctgacatctggagctgacatctagggccagactggtctctggggtccaggcactgtagggtgctgagcagcatctcatgtgctggcccctcccccagtcatgacagctggaatgtccccagacattgccagcatacccaggggacagagtcgcccggcgggcatgcctggtccgacacatggatgcgagcgatggagccagggctaagcagtgccttttgtccccaccccatcccccagtgacaggagagtccccccccagcctctctaaagaactgaccagctctctggccggggtcggcgacgtcagcttcgactccgacagccagtttcccctggacgaactcaagatcgaccccctgaccctcgacggactgcacatgctcaacgaccccgacatggttctggccgacccagccaccgaggacaccttccggatggaccgcctgtgagcgggcacgccggcaccctgccgctcagccgtcccgacggcgcctccccagcccggggacggccgtgctccgtccctcgccaacggccgagcttgtgattctgagcttgcaatgccgccaagcgccccccgccagcccgcccccggttgtccacctcccgcgaagcccaatcgcgaggccgcgagccgggccgtccacccacccgcccgcccagggctgggctgggatcggaggccgtgagcctcccgcccctgcagaccctccctgcactggctccctcgcccccagccccggggcctgagccgtcccctgtaagatgcgggaagtgtcagctcccggcgtggcgggcaggctcaggggaggggcgcgcatggtccgccagggctgtgggccgtggcgcattttccgactgtttgtccagctctcactgccttccttggttcccggtcccccagcccatccgccatccccagcccgtggtcaggtagagagtgagccccacgccgccccagggaggaggcgccagagcgcggggcagacgcaaagtgaaataaacactattttgacggctgtcttttatatttctgagcacacacagagccctggcgtccaccggggcaggcgcaaagtggacagagcatgcagggcggcggacccccccacgaccctcctcgccctgtctccatcccctcgaagccctgcctcaccgcaggcaggcccatcggtggccacctttgccgggaagtgaccggaaggccccgtgaggggtcgaacgcggaggcaggggttacctcttggggctttacaatccgtggcccctcctgtcctgcactgtggtcaccggtcctgtcatagatgctgttaatttaaggtacaggcagaggtggccaggggagtttcattgtggtttttttttccttttagtttctagttacattttggttgtagatgactcgcttaatcttttaagccaacacttgcctgagagcatgtttttatttcagaaatccaactttacctattttttaagctaactggaaatggaggccatgcgccccaaagcagcccgccacccacctgagtgtaagaagtgagtccggcttttgggtttcaccccaagttatctcaaaacaaaagggctggtcaggctgggcagggccttgtcaggagctcacggtaggcagaggtgcctctgccagggccacagaacagacttccgggaaggggccttggcttttattgagggtctctcaaagacccagcctgccagcctctcccagaggtgcctgctagtccttagagtgtgtgtgtgaagatgccatgaccagtggcagctgagacctctctgccccaagagtgtgggggactggcagggagcgagggtccccgagacgaggaccacggtcctccctgagaacctgggtggaactggcatttcatcccctctccaccctaccctctggctcctagcccacaccccctctcttgggcagcgtggtctgctggctgccccttcttggcagctcagggtcgtggcaggtggacttggagacacacagcagtgtgtgttttagtggcaggtttcaggagcacctctaagaccagggtgacagggtacttgggagctgtcctggaccctccccataccacgggccctgcaagggaggcatcagggctggctttgttttctgctgttcttggaataggaactgctgttctgatccccccaaaactgcattgcggctctcgctcgctcctgcctgccgggacagcgccttctgctgagtccgtttatttgtagtgtcatggctgctgctttcactggggtcctgggcaccctggcttctgtcctcagagctgggtttgatcctagcaaccatcccttcctctctttgcccggcaatgcctttggcatgtgtctgagcagccaagtggccactcataggagaaggctccctggtcacgttgctcctgctgccgtcttgttccaaggtgcgggggggacactgttggtctgtccaggtcaaggtccctttctcttaccatgacagaggctgggggcagacagcggggacttttttttttttttaagaaaaactacatgtacataggagagtttcattaccattagacttgtatgtaggacttaaaaaaaaatggccttaataaaattacaagcaacccgcctggatgcggttttcaaaagaaggcattgaggaccatgctaggaaacctcataccccatccgtccaacctccggcgggcgccactgcttgtcctctggtcttcggtgtggacagataggagaggagggatgcccacctcggagcatcccaggcccgtggcccattttcagcatcctgaagccagattcacagtgacattgtgttaacgtgacgaccttggtccattatggagttctttttccaataagaacctggtggaccgaggtccgagcttgccagggacagtggggcccacgcgagtacccggggcccagccaggagccagcagccaggcgtccctgtgttccagaaggattcacgcccctcctggacctgggcgggcctcccagggggtctgtatcacggccttttgtgtgtgcgtacgtgtggtttttttaaatatcactactacatattcttgaattgccaagactttctgaaacaagacagcttaagggaatcagccttttgctttgtgatgtgaaaatactgtgatttgacgagccgcttcctgaggggcaggcccacgtggggaggttgcgccgtgtacatagacccgccgtctgtgtccttggtcaggcccggatgcttggtctacactgggttagaggctgctctccccacgcacccatgtgctcatggcttctgcagaccctctgctgggtacatcggtcccctacggcgaagttcagccagggctctccctcctgagagcatggcgtccccaccttcctgtttcgccgacgtcactacccagggtggcaagtcttgcaggcagagggtgtagcccaagttcagcctctctctgtgtcctccagagaagagggttctttgccctcatcagggccctgcttgtgggttttcggctctggggaggagagtgttggcatcagtgtgtttggcctgatttcttcagggggccaagctcccgggaggacccctagccaggagggccccccatgtccatccatccctcctgctggggcttggatgtcaggcttgggggctgtgagctgggacctcgcctgagcccggtcaggtgggacaggagcctgccagaagcccatggggggccaggccgggtggcttctattttatttttttagagatggggtcttgctgtgttgcccaggctggtctcggactcctgggctcaagcagtcctccctcctcggcctcccaaagttctggggctacaggtgtgagccacttctgcccagcatcccaggcctgaacagccttggcaggacccgtccctagagggggctctggtgcctcccttaggtgggccttgagctggtttttaaccaaacatccttccaaactcgggctgcgacctgcttcctgagttttctgtatttccaaggagccctccgaccagggagaggctggtggagtaaggtccagcggtattcgggggtcctctgtcacctcgccctgaaaacagcagctcccatcaccttcactgggtcccgatggagccgtctcagaggccgaggggccctctgtgtgggggtgggacgcaggggctctcagagcaagggccacaaagccgatggcacagatgtgcccctgggcctggcccgtcacccacatgtggtgccctgggccagggcgtgcgggcgccagagccttccctacacagcctaagagcaggggcaagactcggcccctcactcaccctgggaggcctgcctgggctacatggacacctgggtctctttctacccccattcaccatggaccaggggcctccatttcctgggggctcttgcggcatgtgatttgggggtccctgggacattctcccgtcagctccacctgagccaagtgtcctgttccctgcggcccttggccttccagggtcctggccaggcaggggtcaggcaccccatactcttccgtgtggcacaggtgtccacccacccccactggccacagacaccattctccccctgggagcaggaggtggagtaagttgtacccccaggcctgggtgctggggagttcctgagggcatgggtggggcaggagtgagtgcctcgtgatcccagcctcagtttctctcttgtcactttctcaaacctgcaggtctcagggccccgggctcctcctgggcaggatggggggcaggggctgggccttggggtggtgctggctctgatgattccagagcctgtatccaccttctgggctcctggccagcaccccacccccaggagccagggacaggtggcatgtgttggggtcgggggatggcccccatctcgaagtgttctggaatttgggggcaacccttgcccagcccagccatcaagaacttctgatctcctgcccaccaggaggggacttagccatggacttggccagtaggcctggggagggagggctttggcagccaaagtccactggccctgccgtgcccctgagtaggaaactgtcccctaggggctgggtggccccactgatatatgcaaacccgccggtccgagccctgttcctgcctgtgctcctctgtgcccaggctggctctcccccaaccctagcatgtatactctgccacggacgtcccgtgggccatgattgtgggcggccgcagcgggcgggggcaggcggctcagggcacactcggccgtccctgccccatcctctggcagggctgcttttgtctttgtacctttgcatcctttgtaatgaaacgtaataaaaatccaacgttttcgtcactggctcttcctcttttttctgagcccctccctcctccctcaggggtgacacatgggcgtggcaggtgcactggcaggtgcctcaacccttccgaacacacacacacacacacacacacaccccagaccaggcaagggaaggggtccccaaagctgggacaactgggaacctgccccccagaatcctggggcggacactgtatcggggtctcagctcttccatggctggcatccaggcctgtgaccatgaggtggtgggtcgtggaggtggacccaggggcctccccaaatcccaaatcacagttggacagtccctggcaggccactggcactcagcagcagctgcagcactgaggccttggtttggggttccctggcccgaccctccctcagaggcccgtccctactgtctccatgcagcaaaaaccacagccgccactccctgcacacacactttattttgtcctctctgagcccttctcacttccccctcaggacggccaccccttggggctgggtgcagagcccccatccagccgcggtgagggtggctgtcatccggcgggtcctcaccctggtccctaggcttgccgcagctgatgggtctcatagtcctctgggatggtgtctgcagggagagggcaggcgggtgagggctgagaaggccagcagggcctgtgtgcagactccccgcccacggcccgctggccctcggctcaccattgcagcggtaacgcaggttggcccagatgatgttctcctgggagaagcagaagacccccaggcggccaccccgcatggttgtgtccaagaccacgttgctgtcggccaccagctcagggccctcatagaatcgcaccctgagggtcagacatggtgaggcctgggggacctgggccagacccttccctctcagagcttcagtggccagccctggaagatgggtacccctgactgggctgcactgggagcaagtgaggcctctgccttgggcctcagtttcctggtgtggtggacatcaagggccctggacatagttggtgctaaacagagcacctgggcttgctagcagcatggaatggaggctgagaaacagggactgggtgaggccccatttctagctggatacacactgtgtgctgtgtcctggccagggtctcgctctgtcacccaggctggagtgcagtggtgcaattactgccaccttaattcccagactcaactgacctcagcctccctagtagctgggaccatgggcacgtgccaccatgcctggcatttttttttttttttgagacagagtctcactcttgtcacccatgctggagtgcaatggcacgatctccactcactgcaacttccgcttcccgagttcaagcgattcttctgcctcagcctcctgagtagccgggatgacagggccccgccaccacacctggctaatttttgtatttttagtagagatggggtttcaacatgttggccaggctggtctcaaactccggacctcaggtgatccacccgcctcggcctcccaaagtactgggattacaggcatgagccactgcgcctggcctaatttttttcttttttgtagagacagggtcttactatgttacccaggctgcctcgaactcctgggctcaagcgatcctcccatcttggctttccaaagtgatggggttacaggtgtgagccaccacgcctggaccagcataggctcattctaactgccctgtatctttcctatcgtacagatgaggggaccagggtcacacagcccctgcctggccagggcactcccacctgggcctgtgtgtccccagcccagcccaccacagagggtggagtccccacctgatgtagcccacttggggccggtgctgcaggaaccaacgataggacttcttgtccttccaacccacgtttcgcgggtccttccacagcagccgcacctgggactctgtgtctcctgtatgccacagagcgttccgcagctgttccccggggcctgtggaagacttcacagcctgccaatacccaggaaaggtggtcagagacctcgtgggccaccggagcccccctagacaccttcctggagagacagttgggagcagcaggtggtgggcggccagggggatccggatgagagacccacaaggaagccttcttcaggggccaaatggcagcttggggataggtcacagggggcagcagtggtctgcaggttcatgagaggatttgggagtccgtggacagattcagggtctgggaggatggggggctctgcagaaggacttggaaactaaggaaaagtttagggctgtgtgagagggtttagggtccataggaagactggggggccctgagaatgtttgagaatttgtgcaaggaactgggaggatttggggactgcgggagcccagaggagggctgggacagctttgaggtccatagtatgaggctagggggctggggggctctaagggctgtaaagggttttacggagggtcatgggagggcatgaggaccgcagaggtcaggcacggacggccctggcaccttgagttggatgccaggctcggccacagcacggaaggggttcgcctgccaatacgtttgctccatctgcttccacatgaccacgtagaagctggagctgtcctggtagccaaagatgaagcccgcatagtcgtcatccgtgaccgtgttcacatggaacgtgccctcgaagtccacgccattgaaggcagtgtaacctagggatggaaagagagcagtggcctttccgaacgccagccccagcccccggaacctggcacccagaacccaaacctgccccctgggtcccgatctgcctgcagacctgcaccattcccactcgcagagcccggactcagccacgccccccatctaccattggccacgcccctccagagtccacctccacttggccccgcccttcccgagcccgcccctcctctggccccgcgccttctcctcccgggcccgcccatataaccccgcccctctgtccccgcccttcctgagcccgggccagcccccttctggccccgcccattctcagcccgggcctgccccttctctggcccctctccctgagcccgctccgtggcaggatagcgctgctccccgcttctcacccacagccaggcctgggtcgctgttcattgtctgcacgatctcccttccctgatggggtcaaagaaaggagggcctcaggctggccgtgacagccctaggcaccctgtcctcagcataggcctcactgtgggggttctagggtcccatcaccccccacgtggaccccgctcccacctggttgagcaccacccagttggggtcaatctgcgcgtcaccctccgggtccagcacgactgtctggaaggccctgaagtcggtgagcgtgacttcagcgttctccggacacacgtcgatcttgtctaccaccttgtctgcatcaaagtcgtcctggcacacgtcgcccacgccgtcccctgagaggtgggagacccctcggtgggctaaagtcagggcccgcccaccgtagaccccgcgccaggagcccccactggccccgcccccaccgcaggccccgcccccgccgtactgtccgcgtcctcctggccggggttaggcaccaggcggcagttgtcccgactgtcagggactccgtcattgtcgtcgtcgtcgtcgcaggcatcaccctggccatcgtggtctgagtcctcctgggcactgttaggcaccgtgggacagttgtcccgagagtcctgatgtccgtctccatccctagagtggataggtgggatccagagacaatgagctctccagagcgttttgtcaaaggctacccggacgcccaccccaggtggcctccttactggtcttgatcgctgtcacaagcatctcccacaaagtcgtggtccacatccgcctgcggagggcagcatgcgggggtccataatcagacagaggaaatcagaaagcctcccacccaacccagccgcacagccaaggtcctcctgaccccaaggaaacccccaccgcaggctgctcggaccgagaggtcatttctctggcagtgtaaaatgctctaagctgggctgtgggctgggtaatccaacttgcagttcacccagagggcttacccagctggagtctggcctgccctcacctgatccgggttgctcttctggggacagttgtcacaggcatcccctataccatcgccatcactgtccttctggtctgagttgggtaccctagggcagttgtcggcctggttgcggatccctgcagaaatccacgggaccagagccccaagattgggaccaggccagaatgacttcattaggatgaggccagcctgaggctggcctggaacagagtcccaacttcatggaagctttttttttttttttttttttttttttttgagacagtctcattgtgtcactcaggctggagtgcagtggcatgatctcggctcactgcaacttccacctcccgggttcaaatgattctcctgcctcagcctcccgagtagctgggattacaggtgtgcgccaccacgcccagcaaatttttgtatttttagtacagacggagtttcaccatgttggtcagtctggtctcgaactcctgacctcgtgatccacctgcctcagcttcccaaagttctggaattataggcatgagccaccccgtccggcccacaggaactttaagaatgaatggtcccatccaagggaaggctagtgagggggacgggctctcactcccagggtggctcagctgggtgcccgtgtgtgccaccctgagcccctatgtccccatctgtaaagttgtcacctcccaggtcctaaaccccaggctcgaatctcttgtcctcttaattcctgcctgcggcattgacacagggaccaccttcccttccaaatatccctgcgtttttcctggccttgcagcccagcttgcatttttctggcgccccaccatggtctttggtccagggcgccctagtccagcttaccccatccggcttccaaaaccagccaagccccgccccggagccgaatcccgcccttcggtgcccgccgcctctcctcgccccccaacccccatcgagctcacggtcgccgtcgatgtcgtcgtcgcacgcatcgccccggccgtcctggtctgtgtccttttggtcgtcgttcttctgggaccggcagttgtcgcacgcatcgccccacttgtcctcgtccgtgttgcgctggtctgggttccgcaccagcgggcagttgtcctggatgacagggtgggttaagggtgagatcaggtcgagaaggcaaaggtcacactcctcagattcccaaatctccgaggacgcgtctcctcctcaaggaacctttcgcccctcctagaccacggaggccacgcccctcatccaagccacgccccatcccacttccctaggccccgctcacagctctgtcttttcttttttctttttctttttctctttctttctttctttctttctttctttctttctttctttctttctttcttttttttgagacagagtcttgctctgtcgctaggctggagtgcagtggcgcgatctcggctgactgcaacctccgcctcccgggttcaagcgattctcctgcctcagcctcctgagtagctgggattacaggcgtgcaccaccacgccccgctaatttttgtatttttagtagaggaggggtttcaccatgatggccaggatggtctccatctcttgacctcgtgatccgcccgcctcggcctcccaaagtgctgggattacaggagtgaaccaccgtgccgagccgtagatctaccttttcattggggaccccgtccccgtcggcatccggatcgcaggcgtctccgatgccatcgcggtccacatcctcctgccctgagttgggcacagtcacgcagttgtcctgggggcgggcacagaaggtgtgaggggcgcggtcatgaagtcccgccctccctcctgcccaagcccgccccgctccgcccccacccaccttacggcactggcgctccgggcagcgcagcttctcgtccgggaagccgtctaggtcagtgtcgcgaccacagaggatcccgttgccggcccagccaacggcacactgtgggagagtgtaagtgggtgccctggagtggccgccacccaaccccgcctcaagcccagcccgcccgcactcaccacgcacgaccgcgagccatcgcgctctaggacgcagtctgcatgctcgtggcactcgctgggcgagccgtcggggcagaagcgctgtgcgcgccgctggcagccggacgcctggtcgcccacgaagccgggctggcacgggccgcactggaaggagccctgcgccggagccgccggaggtcagcgcaggccgcccgccgctcgccccacctcccgcgatcctttcttcctccccagcgggccttacccgggtgttgatgcacacggagttggggacgcagttatgttgcccggtctcacactcgttgatgtccgtgcaaacctaggggaggggaactcagaggtcaccaccccacgcagacacctccggacctcccacctcctccacacttcctccgcatcctgcctctcccctccatcctgccccaaaccgatcagccctggcgcagcggacccctcctctccccacccctcccgctggaaggaggctggaagaggagtttactggtaaacaaaatggacgcccccttcccttctgctccaaaaatggggcccccacacctctcacctgcttgttggccttggcgaaagccagccccacgccctggtgggtggggccgctgtaccccggcgggcaagcctcgcagcggaaccccgggctggtgttgatacagcggactcgggggaagcaggggtgggcgttgcactgggggaggaggggccacagagggtcagagggcttcgagctgggccctgggggccgcacctcgtagtgtctcggatgtggaaagttcaagggccatatgccagtgcttggagctctgagatggaagcaattgtcgcaggggtcaggcacgactttgccttgatgacggcaagggcgcaaccgggagaggagaggagagctgttccctcatgggcgaggggaggaaggatgagggcgggcatccccagcagaggggggcaggggtcgtcggggcgtgcgtgcccggcggtggcggggggtctgggcgtgcgttccctggctgtggaagggtcgttgggactggcgatcccctgcggcgaggagggtagctggggcggaccacccctggcggtgagggagtcgtcggggcgggcgtcactagctatgtagggggttgtgggggcgggcgtcccgggtggtgacggggatggtccttgggttgggcgtccccccgcggtaaggaggtagtctggccgtgcgcccccggaggtgagaggctcttcggggcgaacactcccagtggaggaaggggtctcccgggcggcgagagattggggggcggtagagggagtcgtcagggcggtggagtgtcggggctagcgcacctcgttgacgtcggtgcagtgcgagccgttgcccgtgaagcccgcggggcaggggccgcagcgcgcgccgctctccgtctggatgcaggccacgccggggaagcagaagccgggcgcgcagtggagcaggggccgcacgctgggtaggccggtgcgtactgactgctgcatccctgcgggggggaggggggagaagcggcggggctgatcggtggctcgcccgggggcagagcctatcatggccacgccccggggctggaggcttccccttcccccccaccccccgccccggggcggcccgaaatcctgcgctgtccgcgatcccgccccagaggctgcgcgctctgaccgcggggtctccccggtctcttctctgagtctctgtcccgcttttctgccccgtggcgtctctcacttccccaaaactctctcaccgcttctgtctctttttgtctctgtttctacacaccccatcccattcccgttcgtccgtccacctctccgtcagcctccatctccttccgtctcttttcctccccagctttccctggctctctgtctctgtctctgtgtctctgtctcccgtctcttctctctcccgaccgccccgccgcgctcaccgcacgcgtcacactccatcaccgtgtttttcaggaacgtgatctccctgacctgcaggggtgggatggaatcagcggggtcccaacctctcctcatccctcgggtctcccctctctctaccccggggtccctttctacagcctcttttcgccaaggactccctacccgccgacccccttccctccccatctcctctccaccttctcgggtacttcctctctcctcgctgggaactgagacccccttccgttccctggcactccctgccccgcacccgggccccgcacctgctgccgcagcagctcccgcacgtcctgcagcgccgcgttggtttcctgcagttcccgaagcatctgcgggcccaggtctgagcctgcggcggcaggggacctggtgaggcgtcatggggccggggaatcccaccaccaactcccaccgttgcagcgaacccggacctccgaggccccactgcgctcctctagtctcggtcccgccacctgctttctgcgcccggcacgtcccctacgaacagtccgtgagccccaaacagcctggatcccgggcctctcacgggtcctacagtccgttgtggggccgtgggcacggcgcgggtgctaacgcggcttacccaacgggctctggccctgtccggacgcgccgagggcagccagggtgagcagaagaacgcaggcggtgtcggggaccatggcggtggcggggagctgggtggctgctcgctttctaccgcccacgaggcccgcggggcctatttatccccaaggcacggccggccccagggacggcccaccacagccctgcccaacgtccagcctcaaggtaaacagatggcgctggcccctgcgttcaagtccccgcccggaatgccccgcgaagtcgcccgcggctgaatccgacatggtggggaaactgagtcccggggtctgtggagagagctggtggggcagggagtcagggggtactgcccccactttcattcactgtgtgtgtgcgtctgtgtgtgtgtgtgtgtgtgtgtgtgacggggtgtggctgtatcgcatcctcttgcttcagtctcccatgtagctgggactacaagcccgcaccaccaagtccagctaatttatttttatttttatttttatttttagagaccgggtctggctatgtcctgcaggctagtagtctcaaactcccggcctcaagcgatactccccacataactgggattacaggatccagccatagcattcagctcattgattgattgattgattgagtgcttgctgtatgccaaacctgagttccagttccaaacaaggcaggctccatggccacgctctcagctcacacttcgggaaacagagtcaccagcgtctgaaaaaataggtccacccactatggatcagactgactggccctccactcctcctgaagtgcttcaaaactgggtaagttgctgggtgcggtggctcacacctgtaatcccagcactttgggaagccaaggcgggcagatcacctgaggtcaggagtttgagaccagcctggctaacatggtgaaaccccatctctactaaaagtacaaaaattacccaggcgtaattcctcccttgcacaatggaggtaataagttaataattattaattaatgattaatagtaatgatgattatgatgatgaatggaaaataggggaggggcagttgagacctgggactctcaattttcctgcctctgtccaaggaggccgcttctggccccaacgctggagggctgcaaatgactccccccaacccaactcattgctggtgttccctcccctccccatggtccctcggctggtggaggaggggacagcgttcaggatcttgccccaacccctgtccaaggggacaggcccacttggttttccaatctgcgcaatggggtgtgaggcccccatctggaggggagcaagttaaagggctctagcaaggggaggtccggggcttctgtttgtccaggctgtgccataccttccaaactgtgctccagctgctgtgggaacagcctgtaataaaaataaaagttaccgctaactggccagccacactctggagttacaaaaccccttaacctcctgcaatcagttaacactctccactcccaccttccagtactcacagcgtctattctatagacagagaaactgaggcccagagagaaaaagtgactggcctaaggccactgcccgagggcaggggtgaatctagactcagagccagatatgttttctggggagcctacagagaagtcaccgagggcttcctggaggaggtagcaaggagacagacataaaagaaaaggaggacttggatcagcagagggaaaaggtgagggcagttttggtggagggaagcatgtgaagcttggaggtggggacatttctagacacaataattatttcacaaacatcaaggactgttgtgtgtcatgtctcctgtgctgggtgatgggcacacagggtgaagaagccagacccagtctctccttcaaatggggagcccagtgggctcatggctgtgacgggacacacagacaatggtaggagtccccaggaaattgatctgtttgaaaggggatgggtcagggcgggcttctggaggaggagggaccaccaagctgaggaccggatgatgaggaggacacagccaggcagaggtagcagaaagtcattccaggtagaggaaacagcataggcaaaggccctgaggcaggaaccaacctggcccgttggatggactgacctcaaggtgacaagctcttggggctcagtgagaagcaggagatgaggctgtgtgtgaaagggcagtgctggtggtgtggggctccagtggtctcccgagggtaatggggagccacagagagtgcgtgaagagagacaggcctataagtggagtgttggtggaagcagctggtcccagccagagcatttccaatgaagcctgtcctcaatagtgcctgccctgcctgctgcctacattggggccatgagctcacctcctgttttccttggccttcagcacacctgggggccgctcctggcagcactggaattctcgggaaaaccacagctccagtggggcctgggggctggcatatgctgcacacagctaggacaggagcacatggaagccaggcccctgccacaggctggtcacagtgctggggcttggacacacgtggccttatccatggctgggccacggggagttgcagggaagggcattccaggcggagggaactacaaaggtggagttcctgagggtgtcccaagatcggacaacagaggcccggaaaggggatgtctggggtcacactcctgcctcctggatctcgccagccctgaaatcccccttctaggcagcagtcccctcctcctgtgcacaccacacttgcctcagattacagaataactcactgtaggtgtcattctgggcctttgtacctgctgttccccccacctcgtacaaactcctccatccttcaaggtccagctataatgtcccctcctccaggaagccttccctgctgatattctccagataaccttccagcctagccatgatcctcgggactgtgagtgtctgtggtttgctctgtccctccgagcctgaggggctcccacccaggggcctggactggtgtagaaaggttaggctggagggcttggtgagccgggacagcatccctatgattcgtgttcattactattttttttttttttttttgagatggagtctcacttttgtcgcccagctggagtgcgatggtgcaatctcggctcactgcaacctctgcctcctgagttcaagtgattcccctgcttcagcctcctgagtagctgggattactggcacctgccaccacgcccagctaatttttttatatttttagtagagacggggtttcaccatgttggccaggttggtctcgaacttctgacctcaggtgatccacctgcctcagcctcccaaagtgctgggattacaggcgtgagccaccgcgcctggccattactactttttataattaatgtaatgtcattactatttttttttttttttaaaatagagatgggggtcttattatgttgcccaggctagtctcgaactcctgggctcaacagatcctccttcctcggcctctcaaaaccctgggatttcagccactgcacccagccaacattatcatatgaatcctagtaacccctgccacctctgtacttgatatggcagggaagggggccacacagcctgggttcaaatattggtgagcatggccttactgtgtgacctaggacaagtcacttaacctctctgtgcttcagttttctcacccataaaatgaggatgatcactgttgagaggattgaatgagctgacccatggaaatccttcagcccagcgcccagctccagcgctactagcgtgcttattccatatgaaatttatacaccgtgggccagtgtggtggctcacacctataatcccagcactttgggaggccacagcaggtggatcacctgaggccaggagttcgagaccagtgtggccaacgtgaaactccatctctactcaaaatacaaaaattagctggacgtggtggcgcgtgcctgtaatcccagctaatcgggaggctgaggcaggagaatcacttgaaccggggaggcagaggttgcagtgagccgagatcacatcactgcactccagcctgggcgaccgagtgagaccttgtctcaaaaaaacaaaacaaaacaaaaaaacttataccctgtgcctgtcgcttatacctcagatcgttcttatttctatcttactcagagaggagaagagacagtctgaggtcacacagccagaattagaactgaggcatgcaagaccctcaagcccttcatacccgccctctctgtccttgccacagaaacagaatccagcatttcgctggcccgagcccctcattaactgggatgtcttctcggcccaggacctcctggccagagcatctggccggcgccccagccagccccacaccaggccccgtggttccaggagcccggccaggctggggaagagggacgggtgcctgcatgatggggccccggggcccttcctggcagacgtctgctcagccaggagacgtgtgggcgccccggctccctgcctcccgcccccaccgttgcctgcctttgtgaatgcagaaggaaagtatgttgtgaaggcagccgccctgccctgggcgggccgggctgtaggcccccagtctgcggaattcatcagggcggcaggggagggcagcttggcgacctctgcatcctcagcctgccttgaactgggagagacgtactggaggcatctctctagaaggaacaaaaggcaggggtgggatggggggctctgagctttgaagtccaggagacgccccccgactggccgtgtgacctttggcaggtgccacctcctctcccagtctccttttttttttttttttttttgaaacagggtcttgctctgttgcctggcctgaagtacagtgacaatcatagctcactcattgcagcctccaacttctgggctcaagtgatcctcccacctcagcctcccaaagtgctgggatcacagatgtgcaccactgcacccagccccattctccttttactcagtccctacccccattgcatcccaggctctactggatggcgataaaggaagaagacaacaataaatacagtggctacagttttcttgagcaagtgccaaatgcttgaaaccttaccactcagcctttgtgggttttctctttctgtcatcccttaagtcccagaaggcaggaatttgtcatcatgggagacagtggggcacagtgatgaaggtctcagtctctggcatcagagcctgagtttcatatcccagctctgctgtggtacatgaggcaagttgcttaacctctctgtgcctcagtttcttcttttttcctttatttcttcttcttttttttgccaccttcgaaagtttcttataatgtaaaattttacttctcaggttactatactgaagagttgcttcaggagagaaagaatttcaccagaggccgggcgtggtggctcacgtctgtaatcccagcactttgggaggccaaggagggcggatgacctgaggtcaggagttcaagaccagcctggccaacatggtgaaaccctgtctgtacaaaagtacaaaaattagccgggcatgatggcaggtgtctgtaatcccagctacttacttaggaggctgaggcgggagaattgcttgaactcaggaggcggaggttgcagtgacccgagactgcaccattgcactccagcctgggcgacagagtaagactctgtgtcaaaaaaaaaaaaaaaaaaaaaaaaaaaaaaaaaattcactaggaacagataggaatttcacaatattcaattgatactggtttctttcttttttctcttttccttccttccttccttcccttcctccttcctccctccccctctcccttccttcttccctcctccctgtctctctctcttcctctctgtctccatttctttcttgtttttgaggtaggttcccgctctgtcaccccagctggaccgcagtggtacaaacacagctcactgtagctcaaactcttgggctcaagccgtcctcacacctcagcctcctgattagctggggccaaaggcatgtgccaccacacctggctaattttttttattttgtagagacagggtcttgctctgttgcccaggctgctctctaactcctgggctccagtgtcccttccatcttagcctccagggtagctggaattacaggcataacacctatatttaatgaaggtttcatgcagtcaaataaactagtgtctgtgttctgaggggaggagagtgccttcagggctaactgtagaagctttgttctctccttcagtctctctgtctaatgaagtgaaaatggaaatgtgtaaagttttacgcaaggtaacggtagcaggaaaaaccaaggtgaatataagtatgagaagaatcctgacctcttagcgtcagtgtaagaattgaatgaattagcgcccagaaagttcacagcccttgcttgggaggcggaagtgggaggatcgcttgaacctaggagttcaaaaccagcctgggcaatatagcaagaccctgtctctaaaacaaaacaaacaaacaaaaaaaaaatttaaaattagccaggcatggtggtatgtgcctgtagtcccagctactcaggaggctaaggtgggaggatggcttgagcccagaagtttgaagctgtaatgagctatgattgtaccactgtaccccagcctgggtaacagagtaagacctcgtctcaagaaaaagaaaggcccaggcgtggtggctcacgcctgtcatcccaccccagcctgggtaacagagtaagaccctgtctcaagaaaaggaaaggcccaggcgtggtggctcaagcctgtcatcccagcactttgggaggctgaggcaggtggatcacttgaggtcaggagttagagaccagcctaagcaacatggtgaaaccccatctctactgaaaatacaaaaattagccaggcatggtggtgcatgcctataatcccagctactcaggaggctgaggcacgagcgttgcctgagcccaggaggcagaggctgcactgagctgagatcatgccactctcactccagcctggggtgacagagtaagacagagtaagactctgtctcaaaaaaaaaagaaaaaaaaaaaaggaaaagaaagagctgagccctcaatcaatgtcagctattaacatccccattttacaggttggcaaactgaggctcagcaagtctgtcctgtctcctcaatttggtcactggatgctcagagtgggaagtcacctcctaccgctgcctaaggctccaggagagagtctcccaaccaggcttctgcagttcccgctggagaaggtagggtgggctgtcagcagagaaagtggagagtgcagggaccagagcactactgcagttcctcagtacccctcgtgcccctcccagcccctacctgggctcattaacaggaggcccttgttcaggggagtgatggatggcgtgggaggccgagggcggggtgtgtttacccaccggcggctgcagacaggagcccaggccagggccgggccagtaggggagggaggctcccaggtagggaggagcccagccccaatactgctgcacggaaaggggccagctgggccccttctggaaacagaggccaagggtcagggaggccattctgctggggaaattggtgccgagagttgaacaagtgaacaggtgccagcagagcagagccccaggcagagggcacagcaggggcaaaggcccagaggtgggtatgtgcttgatgtgttggaggttccgcgaggcgtcaggagtggctgcagcaagcggggaggggaaatggaggaaatcttccggctgtgagccatgtttaggctccatgggcgtgtccattcccacatctttctgcacgccaggcccttacctgggctgtgaccgctccctggtgccctgtctgctttcacatggctcattcctcaccccggctggcttagaggctcccgctggccttcacaggcccttggtgtgctccatcagagctgtgaccatgctgtatgggcactgccaggttacacgggtcatggggctgcctcctccatcagactgagctccaccatcttgttcccctctgtgttccctgcatatacacatgatggaatactccaataatggatggacagatggatgtataagtggatggatggatgagtggatggatggatggataagtggatggatggatggatggataaatgagtggatggatggatggataagtggatggatggatggatggatggataaatgaatggatgtatggaggatggatggataagtggatggatggatggatggatggatggataagtgcatggatggatggatgggtaagtggatggatggatgggtaagtggatggatgaatggatggacaagtggatggatggatggatggatggatggatggataaatggatggatggatgaatggataagtggatggatggatggatggatggataggcaaatggataaataagtgaatggattgattaatggatggatggatgatgtataagtggatggatagatggatggataagtggatggctggatagacagatggataggtggatgggtgcaaagataatgaattgatgaatagatggatgaatgatgtataagtgaatggatggataggtagatggatgggtgaatggatggatggataagtgaatggatggataaatgaatggataaggagatatattgtatggatgaatgaataagtgaataaataatggataaatggatacatttatacatgtggatggataatgtataaatggatggataaacagatgaatggatgcataagtggatgtataaatgaatgaatgaatgggtggatggatagataagtgggtatatagatgaataagtggatggatggatgagtaagtggataaatggatggatggataggtggataggcagctgaatggatggatgatgtagaagtggatggatggatggatggatggatggatggacagataagtagatggatggatagataagtggatggatggataagtggatgaatgggtggatggatagatggatggatggatgatggagtaaagaaaagctacaagaccacaaaacaaggatccacaggactaagaaatgacagaatcacatcactggttaatggagcaactgaactgtggagtcctagggccacgggaccacagagttagagatccacgcagtccagtcaacagaagcacagaaccgaagggtagttggaagctataggaccccagtgggggcagagacaagccattggggcatcccacatccacggtgccaccaggatagagtctcagagttgaccccaacagaaccaccctctggccacaccctcacctctcagctctccaaggagcctcccaggggccactgaagccacagggtgctttttcccccaatctgtggagcagccttgggggacaggaccatgccatcgccaatgcctgcagccagtcagcctccaaacactcagtgagtcccggcaccagggccaagtgaggctgtccaagtaccaggaaacactgccagcctctggccaggctcctctggacgccgagtgctctgcagccaggggcaaaggaatcaacgggtaacgtttacatccatgtcccttccaaagccagcagcaacatagcatggaggggaggccgtgccccagctgcgtcccctccgggccacggtgcactgactagctgcccgctccatcgccaggagtcacagctcagctcgaatttctcgacacatccacgtattaatgagctctcccaagacagcacccgtttgcccagcagaacttgcacctgatgcccagaacaaccagcccatttgagatgggggaaactgaggcccttgtctcagaggtgagcccaggaacacagcaggctggagctgagtctcaatcccaagcctgcaggatgctaaacctgaacttatcatcacccagttgggctgcctctcaggccccagccccttgtcctgggacccccccacttccccaccaggtgtttgcttccaaatgtggtgcattgcagaatgccaagagcacgggctgcagcagtttcttcccttccatgggctcagaatatctagctcacagggctgtggtggagaaaaactgtggtcatagcacagaaaggggacctgattgctggcctgataggagccttgcccacaccgtttccccctcccttcttcttcttcttctttttcttcttcttcttcttcttctttttttttttttttttgagatggagtctctctctgttgcccaagctggagtgcagtggcatgatctcagctcactgcaacctctgcctctgggttcaagagattctcctgcctcagcctcccaagtagctgggactacaggcatgagccaccgtggctggctaatttgtgtatttttagtagagacatggttttgccatgttggccaggctggtctcgaactcctgatctcaggtaatccgcccacctcagccttccaaagtggtgggattacaggcctgagccaccgccactagcctttttttttttttttccgctaggtttcgcttgtgtgattacctcattccatcttacatatgaaaaagtagaaggcaagagagtgaggttctaatcctcccgatacccaccctggcagcttcagggagggtttctcgcatctgcagtgtagtaaaaacatggcattgctgggcaccgtggctcacacctgtaatcccagcactttgggaggctgaagcgggaggatctcctgagcccagcagttccagactggcctgggcaacatattgagacctcatctctacaaacaagcaacaacaacaaaaaggctggagtgcggtggcacaatctcagctcactgcaacctccacctccccgctcaagtgattcacttgcctcagcctcccttgtagctgggattacaggttcttgccaccacagcaggctaatttctgtatttttagtagagacggggtttcaccatgttgcccaggccggtcttgaatttcagacctcaggtgatccgcctgcctcggcctcccaaagcgctcggattccaggcgtgagccactgcccggtctgcctgccctttctgaatagcaaggatggacccctgaagtgccaggctgaaattccgccagctcactgagtggggaaacaccctctccctgacgaactcagcaaagatctcaaggctaactctcataggctcagccctgaaccaatcactgcagtcggtgggtggagggctttgattggctgggccaggagcctgagtcccctctggaggttggaggggcaggggccaaaggaggatggtgtcagtaactcgtggtgcaggcaaacttgatggaaactgaatccccacccagactcttgccttagtgggtctctggcaccacgggctactctgagtggctttttctgggggtagggggagggacggaatctcgctctgtcctccaggctggagtgcggtggcgcaatctcggctcgttgcaacctcggcctcacgggttcaagcattctcctgcctcagcctcccaagtagctgggattacaggcgcccactacaacaccctaatttttgtatttttagtagagatggggtttcaccatgttggccaggctggtctcaaactccttacttcagatgatccgccctcctcggcctcccaaaatgttgggattacaggtgtgagccaccgtgcctggcctgagtagctttaacggggtgaccctggccatgtgccaagccccatcccctgtctctacctccggctgctgtatttgaggccccttcttactgccctctgcttgcaggaaggtgggttcttccttactctgctggcctcccgacctcccctgggtaccaagccaccttaagcatcacaaggaaacaggcattacctggaagagtccccaccaccagtttctttccaaattgctgctggtgggccaaggtgcggaggctcatgcctgtaatcccatcactttgggaggccaaggtgggtgtatcacctgaggtcaggagttcgagaccagcctggccaacttggtgaaaccccgtctctactaaaactacaaaaattagcggggcgtggtggtgcctgcctataatcccagctactcagggggctgaggtgggaggatcacctgagcctggggaggcagaggttgcagtgagctatgatcgtgccactgtactccagcctgggtggcagagtgagatcctgtcacaaaaacaacagcaacaacaacaacaaaaattaaggaagggaattccaggcagagaggtgagcttgtgcaaaggccctggggtaggaagtaattttcttgttggaggaggtgaggaggccgatgtgactggagcagagtgagggaggaggggggagatgggttagagagatgggccaaggtgggatcacatgggggccttgcaagctgcagcaaggaggtgggttttattctgagagcaatagggagccatggagagtgtgtgagcaggggaggaacatgatttatgattttaagccatctcttgtggctgcaatggggaagaggccaggcaatgtcaaggcaagagctggtggggccagggccagggcacggccacagggtggggaggagaggttagatttgtttgttttgaagcctgagaggactagagctactgatgagcttgggaaggaagggagggaggagtctcagacgcgcccagatcttgaacccatcacaaggtggttggtagggttgttgcccgacacaggaagacttagcagaaaaccatgaaccccaccttggccatgttgttgctgaggtgtctggtctgggctggccaggctccagatggaaccgtggaccttgtgggcaaagagtggcctgtgacttccaggcctgggctgtgtgcgttgcagggagatgggcaggggtctctggctgcgtccttgatccccatcctttgtgcaaacaggtggggtggggcagggggaacccatgttttccccatcccgggtccttttgttccagttggaagccacgaccaattcgaaaagtccagatgtggagttggacgcaacccttggaccgtgcggtctggggaggccagtggcccgtcatccaacaggtcaggcctccatgtggcctcgctggctgtggcccggctggggctggggggcagaacggctttgatttcgagtctctggctgaatctgcaaaggttaaaaaaataatcaccagcaccaaggcgttgccccttcaagacgtcaatcccaacaccaggcggaaaaaacaggccctggggcccctgccagcccacaggcctgagacctgcagaggggcctgatcagaaggccaaaaagctgggtccccacatctctccgggcacaaggggagactcggcttcccgtctggaacacagggcattgctgtagaagcgcatccacgttcaaggtcaagtgcagcatctacctgcctgccaagccctggcccaggcagtggggacccatgaggcgagtcaaggttggccccggtctgtagggctcccaggccagagatggggtttccccatgctggtcatgctggtcttgaactcctgacctcaagtgatccacccacctttgcctcccaagtgctgggattatgggtgtgagccattgcgcccagccccttccttcatatttacataaaatacccttctgtgacccaggacttggcttaaatgtcaacacctcaggagacctttcccaacccatgggcaaaaatacctacacccaggtatttctttcagacacttctcactcttggaaatgatcttctcggctacattttcatgaggttgggaacgtggtttatccgcagtttgtgccattgtacctggcatatactaggtgagattgtctccttggggacaaaggaggatgctggctatcacaacaaagtttcacaaacatataccctctgagacccccagacctcccccagcagtgccccaggatttacaaccagaactttatttatttatttatttatgagctggagtctcgctctgtcgcccaggctgaagtgcagtggtgcaatcccggctcactgcagcctcgaccccctgggcttgggtgatctttccacctcagcctctcaagtagctgggaccataggcacatatcaccctgtccagctaatttttatattttgtagagacaaggtcttgctgtgttgcccaggctggtctcaaactcctgggctcaagtgatccaaccaccttggcctctctaagtgctaggattacaggtgtgaggtaccacacctggcctacaacccagaaatttgccctcaataaatggcagagtgaggctggtcacagtggcacacatctgtaatcccagcattttgggaggccatggtgggaggatcacttaagaccagaagttcaagaccagcctgggcaacatggtgaaacccccatctctactaaaatacaaaagaaattagccaggtgtggcggtgtgtgcctgtagtaccagctactcgggagactgaggcaggagaatttcttgaacctgggaggcaaagattgcagtgagctgagattgcaccactgcactccagcctgggcgacagagcaagactccttctctaaaaaaaaaaaaaaaaaaaaaaaaaaaaaaaaaatagggccgggcgcgatggctcacgcctgtaatcccagcactttgggaggccaaggtgggcagatcacaaggtcaggagatcaagaccctcctggctaacatggtgaaaccccgtctctactaaaaatacaaaaaaattagccgggcgtggtggcaggtgcctgtagtcccagctacttaggaggctgaggcaggagaatggcgtgaacctgggaggcggagcttgcaataagcagagattgtgccactgcactccagcctgggcgacagagcaagactccatttcaaaataaatacataaatacataaataaataataggcaggcacagtgactcatgcctataatcccagcactttgggagtgccgtggtaggaggatcacttgagaccaggagttcaaggccagcctggataacattatgagacctcacctcttttttttttttttttttttgagacaaagtctccctctgttgcccaggctggaatgcaatggcgtggtcttggctcattgcaacctctgccgcctgggttcaatcgattctcctgcctcagcctcctgagtagctgggattacaggtgcgcaccatgacgcccaggtaacttttgtatttttagtagagacggggtttcaccatgttagtcaggctggtctcgaactcctgacttcatgatctgcctgccttggcctcccaaagtgctgggattacaggcgtgagccacagcacccggccgagacctcatctcttaaaaaaaaattaggccaggcatggtagctcatgcttgtaatcccagcactttgggaggctgaggtggggctaaggtcaggagttcgtgaccagcctggccaatatggtgaaaccccgtttcggctgggcgcggtggctcatgcctgtaatcccagcacttgggaagacaaaggtgggtggatcacgaggtcaggagatcgagaccatcctgcccaacatgatgaaaccccgtctctactaaaaatgcaaaaattagctgggtgtggtggcacgttcctgtaatcccagctaatcaggaggatgaggcatgagaattgcttgaacccagcaagcggaggttgcagtgagccgagatcgcgccactgcactccagcctggtgacagagcgagactctgtctaaaaaaaaaaagaaaaaaagaaaagaaaccccgtttctactaagaatacaaaaattagctggatatggtagcaggcacctgtaatcccagctacttggaaggctgaggtaggagaattgcttgaactcaggaggcggaggttgcagtgagctgagattgcaccattgcactacagcctgggtgacagagcgagactccgtctcaaaaataaataaataaaattaaaaaacaataataaataaaataaataaatggcagagtggtttgagtcatgctggaggcgcacaggcagctatggagggtcagcaggagggactgctatgctgcgactgaaggagagatgagaattggcctggtaagaggccacagagggtgctcgggtggggggaccagcgtgtgtaaaggcttggaggcgacagagaacgatggagtgtttctggaactgtgtgtagaggggcccaactcacacagagtgaggggagaaagggccatactgctggaagggcccacaagccctgggacgatgggacttggactccatcccagggcaatggggagccatgggaggtatgtgagcagaaggcacatcagacctgtaccccctcgtcctgtgccaggtaccgagaggctccctcccagacctgggaaccccatgggctcaacatgcatggtagacacatctcaaagcagttttatgtgaattcctgaggagagctgtctccaacaggccaggccacccgctatcctcaccaccacggggctggggaggtctgtcgtccacaggagcctcccagacccagataatgcgctgacagctgcctggccctgcctgggcctcgaggcctccccccagcatggctgggttcccccgaggcccgggtctgactaccccttcccggcctgactaccccttcctggccctcggtggatgctgaagacatttcttcttattccgctggaattttcctcgtggaccatgccagcgcctccagaaacacatgaaaggaaaatgtttccagtctgagcagggctgttttattgctctccgggctgggagtctgaccacagagtggaaagggctcgtcataccactgttcctcctgctgaagcggctcggacccggcccgccctgccatgccctccttggaggcccgggttctgcagggtttttttttttttccttttttttgagagagggtcttgcgctgtcacccaggctgaacaggctggggtgcagtggtgcgatctcggctcactgcagcctccacctcctaggctcaagcgaccctcctgcctcagcctcctgagtagcagggactacagtctcttgccaccatgcctggctaactttccaaaactttttgtagagatgggatctccctatgttgcccagtttggtcttggactcctgggctcatgtgatcctcctgcctcggcctcccaaagtgctaggatgacaggcatgaggcattgctcctggcctctgcagggtttttccagctaaggaaagtttcccctgcccttgtccccctgaccagggagcaactccctcaaaaaatagaggttgggggccgggcacactggctcatgcctgtaatcccagcactttgggaggctgaggtgaatggatcacctaaggtcaggagttcgagaccaggctggccaacatgatgaaaccccgtctctactaaaaatacaaaaattagcctggtatgctggcacatgcctataatcccagctactcaggaggctgaggcacaagaatctcttgaacctgggaggcggaggttacagcgagctgagatctcaccactgcactccagcctgggtgacagagtaagactctgtctcaaaaaagaaaagaaagaaaatagaaaagaaaagaggaaaggaaaaagaaaaatagaggttgggagctcaaccttggagctgatgcgtttttccatcgtttattcattcaacagtctacttttttcccagagtgtgcccatttctgcatcgggtgctggggcgcaaatgggaacaaggaggatctgtcactattctttgggagctcgtggaaaggtggaagggggggcttcatgtgaccccattcccagagctgaacatggaggcttggggggaagctgcttgcctgagatggtgcaagggaataagtgacagggtcagaacgcaacacacagagtggctccaaaaccggttttctggtgtggtggcccgtgcctgtaatcccagccactcaggaggctgaggcaggagaactgcttgacccctggaagctgcactctagcctgggcaacagagtgagactcagtctcaaaaaatatataaaataaaataaaataaagtgcacaattccctggcattcagtgcacacaccatgttgtgcaatcactacctcgatctacttccagactatttcgtcaccccgtaaagacgctccgttcccatcagcggtcactcccccttcctctccccaggccctggcaaccacaaatctgctttctgtctctgtggatttgccagttctggccatttcctacaaatggaatcacacactatgtgacatttcgtgtctggcatctttcacttggcatgtgtttttggggttcgtccatgctgtagcagggagcagtgcatccttcctcttttgttttgtttttgttttgtacttcattcctttttgtggctgaatcatattccattgcatagatggaccacattttgtttatccattcgtctgttgagggacatttggatcatttctactttttggttatttaatttccttttatttatttattttatttttgagacagagtctcactctgtcgcccaggctggagtgcagtggcgtgatctcggctcattgcaacctccgcctcctgggtttcagagattcttctgcctcagcctcctgagtagctgagactacaagtgcgtgccaccacaccccagtaatttttgtattgttttgtgtttttttttttcctttttgagatggagtctcactctgtcacccaggctggagtacagtggcacagtctcggctcactgcaacctccgcctcccaggttccagcgattatcctgcctcagcctcccaagtagctgggactacaggtgcatgccaccacgcccggttaatttttgtattttttagtagagatgggatttcaccatattggccaggctggtctcaatctcctgacctcatgatccatctgcctcagcctcccaaagtgctgggattacaggcatgagccaccacgtccggccctaatttttgtatttttaatagagacagggcttcaccatgttggccaggctggtctcgaactcctgacctcaagtgatctgccaaccttggtcttcccaagtgctgggattacaggcgtgagccaccgagtccagcctttttttaggggacagcagggtaactctccgtcacccagactggagtgcagtggcgtgatcatggctcatggcagcttcaacatcctgagctcaaatgatcctcctgcctcggcccccaaaatagttgggactacaggttcatgccactatgcctggcttattttttctttttctttttattatttatttattttttgagatggagtttcgctctgtcacctaggctggagtgcaatggtgcgatctcagctcaccaaaatctccgcctcccgggttcaagtgattctcctgcctcagcctcccgaggagcggggattacaggcatgtgccaccatgcccggctaattttgtattttcagtagagacggggtttctccacgttggtcaggctggtctcaaactcccaacctcaggcgatctgcccgcctcagcctcccaaagtgttgggattacaggcgtgagccatcacgcctacttcctttctcacaattttaaacagtgctgttattggcctggcaccgtggctcatgcctataatcccagcactttgggaggccaagatgggtggatctctttgagctcaggagtttgagaccagcctgggcaacacggtgaaactctgtttctataaaacataacaaacaaacaaacaaacaaacaaaattagtccggcttggtggctcatgcctgtagtcccagctactcaggaggctgagtagctctgtcgcccaggctggagtgaaatggtgtgatctcagctcaccgcaacctctgcctcccagattcaagcgattctcctgcctcagcctcctgagtagctgggattacaggggcccaccactacgcccagctaattttttgtatttttagtagagacagcatttcaccatgttggccagggtgaccttgaacttctgacctcaggtgatctgccagcctcagcctcccaaaatactgggattacaaacatgagccactgtgcctggcctagacctcatatttttaaaagcagctagtcagggttttttagagaaatagaagcaattggataggcatgtattgatagaaaaagatttattgtgagggattggctcacacacttatggaggctgagaagtcctactatctgctggctgcaaactgtggacccaggaagccagtgatgtctttttttttgtttttttgtttttgtttttctttctttctttttgagatggagtctcactctggcccaggctggagtacaatgacgcaatctcagctcactgcaacctccacctcccaggttcaagtgattctcctgcctcagcctcctgagtagctgagattacaggtgcgcaccaaccatgctccgttaatttttgtattttttagtagagatggggtttcaccatattggccaggcaggtctcgaactcctgacctcatgatgcacctgcctcggcctcccaaagtgctgggattacaggcgtgagccactgtgcctggcctcgttgtttttcttgagatagagtctcactctgtcacactggctggcgtgtagtagcacaatcttggctcaccgcaactttcacctctcgagttcaagcgattgtcctgcctcagcctcccgagtagctgagattacaggcacgcaccaccacatcccactaatttttgcatttttttgtagagatgggttttcgccatgttgcctaggcaggtcttgaccgcctgggctcaagcgatcctcctgcttcgaacttgcaaagagttgggattacaggtgagagccagaacatctctcgtttgatcttgtcaccttctaacacatgacaccagtttcttattcctgatggctttgttattgttcttctctctactagagtcggctacatgaggccacatggtcgtctgtgaattggggacagtgacacccacctcgatgtgtatatagggtgggggtccacagggcccacagggaagtgtatttggtttcccaccatcacaccttccaaaacagcctcggtagccggatgtggtggctcatgcctgtaatcccagcactttgggagactgaggcaggatgattatttgaggccagaagtttgagaccagcctgaacaacataacaagacccctgactctacaaaaaattaaaaaattagccaggtgtggtggcccatgcttgtagtcccatctactgaagaggctgaggtggaaggatcactttagcttgggaagtcaaggctgcagtgagctatgatcgcgccactgcacttcagcctgagtgacagagcgaaaccccgtctcaaacaagcaaaccaacaataataaaacagccacagtgaacttccatccaaaatatatcccaggctgggcgcggtggctcatgcctgtaatcccagcactttgggaggccaaggtgggcggatcacttggggccaggagtttgagaccagtctggtcaacatggtaaaacctcttctctactaaaaatacaaaaaattagctgggtgtagtggtgcacgcctgtaatccaagctactagagaggctggggcagaagaatcgcttgaaccccggaggtggaggttgcagtgagctgagaccgtgccactgcactccagcctgggagacagagcacaactctgtctcaaaacaaaaataaaaacaaaaacaaaaaacaaaatatatcccagcctgaagcctggctcgggaattccaaggggtctgcaggggctaccttcctctccagacactgtcagcaacctttaccaccctcaatagcagccttgagtctctgcagcaaccaaagctttgaggccaagccaaaacccacctccctgacacgctagcacatccccaaaaaagcaacctgtgatcgtagaatcaaggtggctgccggcttgcccccgccacctgaggtttacacagacccaccatccccttcaaagacactgttcaaagcaaggagagctctaacacagacacacacacacctatttttcttttcactaccagcatgcccgggtgtgcctgaggcttggctgtgtatccagatcccacaaggggctcctttgaaacaggaatggggccacagaggaggggcccacaggaacccgcaagcacccactgttcctagggaggagtgctgtacatggagggtcccgggtccacccgaactggccacacttctgcaagggcagccaccgcgagggccacgtctgtggaagctgggagctcaacaaaaagggtttcttttttttcctttttttgagatggagtctcactctgtcacccaggctggagtgtagtggcgtgatctcggctcactgcaacctccgtctccctggttcgagcgattctcctgcctcagcctcccgagtagctgggattccaggcacccaccaccacgcctggctaatttttgtattttttagtagagacgggatttcaccatgttgcccagactggtttcgaactcctgaccttcaagtgatctgcccgcctcagcctcccaaagtgctgggattataggcatgaaacaccgtgccctgccaacaaagtggattttaaagagacccaagtctgggctgggagaagccactgcaatatcctaaatatccttttcccaaagccgtggaatttctctgcagcggccagggccaacgcttaccctcgagggacctctcttggtatgaaggaaaaattccattttcctggacctggggaagctgatgtggaactcgaggaggggccagcctacgttgagagcagacacagggcacagggtaggttataaatttaggactccaggctcaggggcgtgaccaggctgatttaggtcttcaagcaggacagtgctagggatggcctcattcaatatttttttcttttctttttttttctgagatggagtcttgctctgttgcccaggctggagtgcagtggtgtgatctcggctcactgcaacctctaccacccgggttcaagcgattatcctacgtcagcctcccgagtagctgggactacaggtgagcgccactaggtctggctaattttttgtatttttagtagagacggggttttgctgggttggccaggctggtcttgaactgaactcaagtgatccgcccacctgggcctcccaaaatgctaggattacaggcatgagccacggtgcccagcctcattcatttttttttttttgagatgggatcttgctatattgcccaggctggtctagaattcctaggctgaagggatccttttgcctcagcttcctgagaacctgggactacaagtgcatgccaccatgcctggcaaggttggcctcattctgtctggaacccggcctagactgggcgagagagacacttgtgataaagacccatggagacttcaatttgtctgaaacttttaaaaagtttcaataatgagccgggtgcagtggcttatgcctgtaatcccagcactttgggaggccaaggcaggaggatcacttgaacccaggagtttgagacaagcctgggcaacatggtgagaccctgtctctataaaaaagtaaaaaaaattggccaagcacggtggctcacacctgtaatcccatcactttgggaggccgagacgggctggatacctgaggtcgggagttcaagactagcctgaccaacatggagaaaccccatctctactaaaaatacaaaattagccgggcgtggtggcgcatgcctgtaaccctagctacttgggaggctgaggcaggagaatcgcttgaactcaggaggaggaggttgcagtgagccaagatctcaccattgcactctagcctggactagagtgaaactctgtctcaaaaaaaaaaaaagtgaaaaatgtagccaggcatggtggcccgtgtctgtagtcccacctgcttgaaaggctgaggcaggaagattgcttgaacccaagagatcaaggctgcaatgagccatcacggtgccaccagcctgcactccagcctgggcaacagagcaagatcctgtctcaaaaaatatatattcaataatgaatcgtcacaatttagacaaagaaaagaacgcaagcattcataaatagctcctgctcagtggcggctggtcagataccaggtgccaccatatgcccctcatgtatcactctctggggtgttgggggtgtcactagattccatttctcaggtgaaacacagagagaccaagacattggagagaggtcacacagcaagcagatggctgggcagacatgtgaattcagacgtgatgtagttgacccagactcactatctccatcccctgtggtttgaacacagtgatgtgtcatatgtctgccagcactttcatcttgaacttcccgggctcaagaactataagcaacacatttcagtttttcttttttctttttctttttatcttttgagatggagtcctgctctgttgcccagactggagtgcaatggtgcgatctcagctcactgcaacctcggcctcccgagttcaagtgattcgcctgcctcagcctcctgtgtagctgggaatcacaggcactcaccaccatgcctggttaattttcatatttttagtagagacggggatttgccatgttggccagactggtttcaaactcctgacctcaggtgatccgtctgccttggctttccaaagtgctgggattacaggcgtgaggccactatgcctggcccagtttttatttttatttttgagacagggtctcgctctgtcgcccaggctgcagtgcagtggtgtgatctcagctcactgcatcctcgaccttctaggctcaagcaattctcccacctcagcctcctgagtagtggggactacaggcccacatcaccatgcccagctaatatgtcaaaattttttgtagagacagggtctcactatgttgcccaggctgttttcaaactcctgggctcaagcgatcctcctgccttggcctcccaaagtgctgagattacagacgtgagccactacacctggcccctgccaaatatttttaatccccacttggttgcgtctgaaggtgcagggccgactgatagagaagatcactgtattgtttgttaggtttttaaaaatagctagaaaaaaaaatctgcaccataagacaggttgagaaaaaataactagtagccaagtaaacaaaagtggtcatgggccctccagtgatgactagaccaagcactgtttttattctcagcctctccatatgacatactagaaaatccctctggagaggggattacatgcagatgccagccggatgcggtggctcatgcctgtaatcccagtactttgggaggccgaggcgggcagatcacttgaggtcaggagttccagaccagcctggccaacatggagaaaccccttctctacagaaaatacaaaaaattggccaggtgtggtggtgggcacctgtaatcccagctacttgggctgaggcccaagaattgcttgagcctgtgaggcggaggttgcagtgagccgagatcgcgccattgcactccagcctgggctacagagtgagactttgtctttaaaaatatatatataaaaaataaaaataaataaatgcaaatgactgggcccacctaggactctcttaaactgagtgcctgggtggaggtggagggtgatcctcggagactgtgcccctcgaatccgagatgtctgcatccaggggaagtcttggtgcctttgaaagtccttttgtccccactgggacaaattatcccttttttgttgttttttgagacatggtctcgctctgtcacccaggctggagtgcagtggctcgatctcggcttactgcaaactccgcctcccgggttcaagtgattctcctgcttcagcctcccaagtagctggattacaggcatgggccacaacacctggctaatttttggattttcagtggagacgggatttcaccatgttggccaggctggtctcgaactcctgtgctcaagcggtcctcccttctcggcctcccaaagtgttgggattataggcgtgagccactgcgcccagctgacaatttcttttgggtgattttttagagtctccagttgaatcccacttcccaagccccatgccagattcaaagacagctcacgtctctgtccaagcctcaatctccccctctggaaaatgggttgataccacctgctctcagaattgctgggcactgcttgttaactgatggtgtcctgttttttgtgtcacactaaggtttcgcaacctcagcatgttgacgtttggggcaggatagttcaatttttgtgggggactgtcccgtgcatcatagatgtttaggagcatccctggcccctacccactagacgacagtaaagagttgctggattcagcaaatataaatacagaaaaccccgttaaacgtaaactgcagataaacaaatactgcttctgcctaagtatgtctcaaatgttgcatggcacatacttatactaaaaagacatttgagccaggcgcgttggctcacgcctgtaatcccacaactttgggaggccaaggcgggcggatcacgaagtcaggagttcaaaaccagcctaacatggtgaaacccctctctactaaaaaataaaaattagccaggcgtggtggcaggtgcctgtaatcccagctactcaggagcctgaggcaggagaatcgcttgaacccgggaggtggaggttgcagtgagctgagatcgtgccactgcactccagcctgggtgacagaacgagactccgtctcaaaataacaaacaaacaaacacaactcacagaataggagggaacatttgcaaatcatgtacctgctaagagatttgtatccagaatagaaaaataacttttttttttttttttttttgagatggagtctcgttctgttgcccaggctggagtgcagtggcgtgatctcggctcactgcaagctccgcctcccgggttcaggccattctcctgcctcagcctcccgagtagctgggactacaggcgcctccaccacgcccggctaattttttgtatttttactagagatggggtttcaccgtgttagccaggatggtctcgatctcctgatctcgtgatccacccgcctcggcctcccaaagtgctgggattacagacgtgagccaccgcgcccggccgaaaaaaactcttataaatcaacaataaaaagataaataacagaatgtatttgtttagttatttatttttcagagacaggatctcactgtgtggcccagacttgagtgcaatggccccattctagctcctagctcactgcagccttgaattcccgggctcaagcgatcctcccacctcagccttccaagtatctaggactacaggtgtgtgccaccatgcctgactaagtttttgcttttatttttggtagggagacatcttgctgtgtttcccaggctgatttcaatctcctggcctcaagcaatcctcccacctttgcctctcaaagcactagacggtgtattttcttacaagggcagtgatcccatcatgcggtactcccctcatgacctcatctaaccgtgatcacctcctagaggccccatcttctttttctttttttttaggatggagtcttgctctgtcacccaggctggagtgcagtggtgtgatctcggctcactgcaagctctgcctcccgggttcatgccattctcctgcctcagcctcccgagtacctgggactacaggcgcccgccaccatgcccagctaatttttttgtatttttagtagagatggggtttcaccgtgttagccaggattgtcccgatctcctgaccttgtaatctgcccgcctcagcctcccaaagtgctgggattacaggtgtgagccaccgcgcccggctgaggccctatcttctaataccataacaatgggggtttaaaatttcacaagatgcattttttttttttgagatggaatctcgctctattgcccaggctggagtgcagtggtgcagtcttggctcactgtagcctctgcctcccaggttcaagcaattctcctgcctgagcctcccgagtagctgggattataggcatgtgccaccatacctggctaatttttgtatttgtagtagcaatgcggtttcaccatgttggccaggctggtctcgaactcccaacctcaggtgatctgcccgcctcctaagcctcctaaagtgctgggattacaggtgtgaaccaccgtgcccagccaccatatgcattttatggagacaagaacattctgtccttaacaggcaccaagatcattcagcaggggatagaagggcatcttcagcccgtggtgctagaatgactttgcatccacaggcaaaggaatgaagttggatccctacctcctaccatgctcaaaaaatgagctcaaaatggatcaaagccctaaaggcaatagctaaaaccataaaacttttttctgttgcccaggctagagtgcagtggcgccatcttggctcgctgcaacctccacctcttgggttcaagcaatcctcctgcctcagcctcctgagtagctgggattacaggcgtgcaccaccacacctgggtaatttatggttttctttttttttttttctttttttttgagacggagtctcgctctgttgcccaggctggagcacggtggcatgatctccgctcactgcaagctccgcccccctaggttcatgccattctcctgcctcagcctcccgggtagctgggactacaggtgcccgccaccacgcccggctaattttttgtatttttagtacagatggggtttcaccgtgtttgccaggatggtctcgatctcctgacctagtgatccacccgcctcggcctcccaaagtgctgggattacaggggtgagccaccgcgcctggcctaatttatgtatttttggtagagatggggttttgccatattggccaggctggtctcaaactcctgacctcaggcgattcgcccaccttggcctcccaaagtgatgggattacaggcatgaaacacagcgcctggtcttttttaaaaaaatgttttgaggcagggtctggctctgttgcccaggctggagtgcagtggcatgatctcagctccctgcaacctccccctcccggattcaagtgatcatcccacctcagtctcccaggtagctgagactacaggtgcacgccaccatgtccggctgatttttatatttttagtagagacagggttttgccatgttgcccaggctggtctcaaactcctgggctcaagcgacccttccaaggtggcctcccaaagtgttgggattacaggcatgagccaccgtgcctggcccttgtgatggctaattttctgtatcaacttgactaaactaagggatgcccagatacctggttacacatgatttctgggtgtgtttgtgaggttgtttcaggaagaggttagcatttgcactggtgggctgagcaggtgggcctccccagtgcagatgagcatcatcccaccctgtgagggcctgaatagaacagaaaggcccagggaagttggattgactcatcttctgcccacccccctaagctggggctttgatctcttcctgcccgtggtgctcctggttctcactggaatcagccttgtctctcagggtttccagtgataccataggactttcctgggtctccagcttgcaaatggcaagcagatcacgagacttctccatgactgaaagagtcagttccttataagaaatctatttctggccaggcgtggtgtctcatgcctgtaatcccagcactttgggaggccgaggcaggcggatcacctgagataaggtgtttgaaaccagcctggccaacatggtgaaaccccgtctctactaaaaatacaaaaattagctgggcgtggttgtgcacacctgtaatccgagctactcgggaggctgaggcgggagaatcgcttgaacctgggaggcagaggttgccatgagccaagattgcaccactgcactccaggctgggtgacagagcaagattctgtctcaaaaagaaaagaaatctctttctaggctgggtaggtagctcacgcctgtaaacccagcacttttagaggctgagacaggaggatcgcttgaggccaggagttcaagaccagcctgggcaacataaggagatccccgtctctatatatataaaaacaattttttttaaagaaaaaaagtttaaaaacaagaaatctctttctagtctttccatatatcctattgtttctgtttctctgcagaatcctaatgcagtctctatatgctcaaagagtacaaagatgttgataggtctttaaaaaatttttctttaatttattttttattttttgagacagggtctcactctgtcacccagggtgcagtgcagtggcacaatcaaggctcactgcagcctcaacctcctgggctcaagcagtcctcccccctgagcctcctgagtagctgggactacaggcacgtgccactgcgcctggctaagttttacattttttgcagcaacgggccctcaatatgttgcccaggttggtgttgaactcctaggctcaagtgatcctcctgcctcagcctcccaaagtgctaaggttacagatgtgagccaccgagcccagcccaagggtcaactttaattacgtgtctggctatttcttcataaacaaaatgaacaaccatgtgtgctgcttaagtgtctgccggctggggggatttcccttcaccactgcccttcaaggatgtcccacaaaggggctgcagtgctgtggctgtccacttccaggtgaagcgggagtgtcacccagaatcatcggtaaaccaggccaagcattttctttttttttttttttggttcatgctattctcctgcttcagcctctggagtagctgggactataggcacccgccatcacgcctggctaattttttgtatttttagtagagacggggtttcaccatgttagccaggatggtctcgatctccaggatggtctcgatcttctgacctcgtgatctgcccgcctgggcctcccaaagtgctgggattacaagtgtgagccaccgcgcccggcttttttttttttagatgaagtcttgctctgtcgcccaggctggagcgcagtggtgcgatcttggctcactgcaacctccgcctcccaagttcgagagattctcctgcctcaccctcctgagtagctgggattaccatgctaccatgtaccaccattcccagctaatttttgtactttcagtagagatggagtttctcagtgctggccaggctggtctcaaactcttgacctcaaatgatccgcccaccttggcctcccaaagtgctgagattacaggcgtgagccactgcgcccaggcaataattttttaaaaaatttgtagctgggcatagtggctcacgccaaggtgtgaggattgcttgaggccaggagttctagaccagcctaggcaacataatgagacacgaggccaggcgcggtggctcacgcctataatcccagcactttgggaggctgaggcgggtggatcatgaggtcaggagatcaagaccatcctggctaatatggtgaaaccccatttctactaaaaatacaaaaaattagccaggcgtggtggcggtgcctgtagtcgcagctactcaggaggctgaggcagcagaatggcctgaatccgggaggcggagcttgcagtgaaccaagatcacgccactgcactccagcctgggcaatagagtgagactccgcctcaaaaaaaaaaaaaaaaaaaaacaaccataatgagacaccaactctacaaaaataaataaataaataaaaattaaaaaaattagccaggtatgtaacaagcatctgtagtcctaggatgctgaggtgggaggatggcttgagcccaggagttggaggctgcagtgagctatgagcacaccactgcactctagcctgggcaacacagcaagaccctgtctcaaaaaaaacaaaaaaattggtagaataaatcagcaaaaccatctattcctgggattttctttgctggattctttaattactaactttacttgttgtaggtctatgtagcttttgtatttttttttctgagatggggtcttgctctgtagcccaggctggagtgcagtagtgtgatctcaggtcactgcaacctccacctcccaggcatactcaagcgatcctcctgcctcagcctactgtgaagctgagactacaggtatgcgccaccacacccagctattttgtgtatttttttgtagagatgggggtctcactatgttgcccaggcttgtctctaactcctgagctaaaagcaatctgcccgcttcggcctcccaaagtgctgggattacaggcatgagccaccgcacccagcagttttgtatttattcttgagtcagttttagtagtttttgtgtttctagaaaattttccatttcatttagcttattcagtatgtggtcacccaattgctcatactttttattttattttatttatttatttatttttatttttttgagatggagtctcgctctgtcgccaggctggagtgcagtggcacaatctcggctccctgcaacctccgtttcccgggttcaagcgattctcctggcttggcctcccaagtagctgggagtacaggcacacaccaccaggcccagctattttttttgtatttttagtagagacggggtttcaccatgttggccaggatagtctggatcacttgacctcgtgatccgcctgcctcggcctcccaaagtgctgggattccaggcgtgagccactgcgccaggcctcaactgcttatacttatactcttttctgtttctgtaaagccagtagtattgtcttccctttcattcctgattttagtaatctgagtctctttcctgttttccttggtcaatctagctaaagtttcatcaattttctttttttctttttttttgagatggagtttttgctcttggtgaccaggctggagtgcagtggcgcaatctccactcactgcaacctccacctcccaggttcaagcaattctgccttagcctcccaagtaactgggattacaggcatgcagcaccatgcctggctaattttttgtatttttagtagagacagggtttctccatgttggtcaggctggtctcaaaatcccgacctcaggggattcgccctcctcagcctcccaaagagctaggattacaggcgtgagccaccgcgcctggccgtcaattttcttttcttttttcttttttctttttttttgagatggagtcttactctgtcactcaggctggagtgccgtggcacgatattggctcaccgtaacctccatctcccgggttcaagtgattctcctgcctcagcctcccgagtagctgggattacaggtgcctgccaccacacccagctaatttttgtatatttagtagagacggggtttcaccatttgggccaggctggtcttgaactactgaccttgtgatccacccgccttggcctcccaaagtgctgagattacaggcgtgagccaccgcgcccggccaattttcttagtcttttcagataatgaacttttagttttattcattttctctattgcttttctttttctttttctgttttttttgtttgtttgtttgtttgagagagggtctcacttcatcgcacaggctgaagtgcagtcataggtcactgcagcctggacctcccaggctcaaggaatcctcctgtcttggcctcctgagtgtctggaaccacaggcgcccaccaccacacctgaatgatttatttttagtagagacgaggtcttgctatgttgcccaggttggtcttgaactgaggtcaagtgattctcccacttcagcctcccaaagtgccagtgtcaggcatcagccactgtgcccagccatgcattttattccctttcttatttttctctgttctaatcttcagtatttccttccctctttgggtttatttgctcgtcttctagtttcttaatgtaggaagcttaagttattgatttgagatcctctgtgttttgtttgctttttttttagacggagtcccattctgttgcccaggctggaatgcagtggtgagatctcagctcactgaaacctctgcctcctgggttcaagtgattctcctgcctcagcctccctagaagatgggattacaggtgtgcgccactacacccagctaatttttgtattttcagtagagatggggtttcaccatgttggccaggctggtctcgaactcctgacctcaagtgatctgcccgcctcggcctcccaaattgctgggattacaggcatgagccactgtgcccagctgagagcctctgttttgatgtagacatttatagctatgaatttccctctgagcactgcttttgctccatcccatagtttcggtattttatatttgaattgttattcattttaaagtactttctaatttcccttttaattttttctttaactccataatttagaaacatatttttaatcagtatgaatcacaaattcatatttgttaattttctaaatctccttctgttattaaattctattttcatgccactgtggtaagaaaatatattttgtatgatttcagtcttcttaaatgtattgatacttgtgacctgatatttgctgtattcaagaaaatgttccatgtgcctttggaaggaacatgtattctgtcattgttgggcagagaattctataaatgtctgttaggtctagttggataattgttttgatgaaattttctgtttccttgatgatcttctgtctagttattttatccatttttaaaagtggggtggctgggcacggtggctcatacctgtaatcctagcactttgggaggccaaggcgggtagatcacttgaagtcaggagattaagaccagcctggccaacacggtgaaaccccatctctactaaacatacaaaaaaattagccgggcatggtgtgtgtgcctgtaatcccagcttactctggaggctaaggtaggagaattgcttgaacctgggaggtggaggttgaagtgagttgagatcacaccactgtactccagcctgggcaacagagtgagactgtctcaaaaataaataaataaataataaaaataaaagtggggtataggccaggcacagtggctcatgcctgtaatcccagcactttgggaggctgaggtggacagatcacttgagcccagaaggtcgagaccagcctgggcaacatagcaagaccctttctctacaaaaaataaaaaaaaattaaccaggcgtggtggcacacacctgtagtctcagctactctggaggctgaggcagggagatcacttgagcctgggaggtcgaggttgcagtaggcagagattgcaacattgtgctccagcacccacaatagagtgagaccctgtctgtacaaaaaaaaaaaacaacactttttttttgagacagggtctcactctattgcccaggctagtctcaaactcctttactcaaacactcctcctcctaccttggcctcccaagctgctgggattataggcgtgatccacagtgaccagccttgatttctttttaaatccattctgacacactctgcattttaggtagagtttaatccatttacatttaatgtaattgctgatgagcacttatttctgccattttctgatgtttctttttcttttttttgagacggagtctcactctgtcacccaggctggagtgcagtggcgtgatctcggctcactgcaacctctgcctcccgggttcaagtgattctcgtgcctcagcctcccgagtagccaggattacgggtgtgtgctaccatgcctggctaatttttgtatttttcatagagatggggtttcaccacgttggctaggttagtctcaaactcctgacctcaagggatccacctgcccacctgcctcagcctctcaaagtgctgggattacaggtgtgaggcaccgcacctggcctcctatttttctatacatcttatgtcttttttgttcaattcctccactactgacttcttttttgttaaatagatgtggtttttttttttttttggtctttttctttaaatagatgtattctaatgtaccatcccaatgtcactttgcaattgtgagtgtatacaggaaataagaagagatctttagaaatggagtaggtgggtcaaagtgggagaggggcaattaaaactctgaaaggtgggctgggtgtggtggctcacgcctgtaatcccagcactttgggaggctgaggagggaggatcgcttgagcttaggagactgagaccagcctgagcaacatagtaagacactgtctctacaaataaacaatttaaaagatagctgtgtgtggtggtgtgtgcctgtagtccctgctactcatgaggctgaggtgggaggatcccttgagcccagaaggttgagactgcagtgagctgggtcacaccactgcaccccagtctgggtgacagagcaagaccttgtctaaaaataaattttaaaaactctgataggtgttactaaattgatctgaaatttgtctacaaattccactggatgtgttccaaagagagctttgcatgatattaaaattatctgttggtctgtcagtattcccccttaaactgtgccttcttggagagggagacctacttttattcattgtttatattcctacagtttagtgcatgctaggagcccccctgaaatgttatttttattttctgtagagatgggggttttgctgtttcctaggctggtcttgtactcctgacctcaagtaatcgtcccacctcaatcttccaaagagctgtgattataggtatgagccactatgtcttgtccctgaaaaagagtgaagaaggctgtggctcacacctgtaatcctagcactttgggaggcagaggcaggtggatcacccgaggtcaggagttcgagaccagcctggccaacatggtgaaaccccatttctcctaaaaatacaaaaaaattagccgggcatggtggcaggtgcctgtaatcccagctacttgggaggctgagacaggaaaattgcttgaacccaggaggtggaggttgcagtgagccaagattgtgccattgtactccagcctgggcgactgagtgtaactccgtctcagggaaaaaaaaaaaaatgtgaagaaggagaacagaacctctgtccctgtgatgataaacaggcaaattggaaataaggaaccacggcaaactgggaacttttagttcagctgtgcaagctaggagctctttcagctgacttatttaaagagcagcagaatcttgggacagaaagggaaatgagggtgttttccaagatactttaccagagaggaagcgaacgcctggggttaggaaattaaggcccataaaccagtagcttaccttggatttaaagtgtcagaaaactttttattgagcacctactgtatgaggcatcattctctccgtggggaagatcataatgaacaaggccaacaccctgtccttatggaactatgcattaagagagtgactggtagctcatttattcctctcatatatatatatatatatatatacacacagagagagagagatagagtgtatatatatatacacacacacactccctatctatatataatagagtgactagtagctcatttattcttatatatacagtgtgtatatatatgtatatacacgcactgtctatctctgtctctatatataatagagtgactagtagctcacttattcttatatatacagtgtgtatatatatgtatatacgcgcactctctctatatatataataaagtgactagtagctcatttattcctctcatatatacagtgagatatataatatacatcatatatatatatacatatatatatatgtatatatatatatatatatatatatatatatatatatatatatacactttttttttgagacggagtctcgctctgtcacccaggctggagtgcagtggtgcaatgttggctcactgcagcctccgcctcctgggttcaagcagttctcctgcctcagcctcccaagtagctaggattacaggcacgcaccatacccggctaatttttgtatttttagtagagacggggtttcaccacgttggccaggctggtctcgaactcctgaccttgggtgatccacctgcctctgcctcccaaagtgctgggattacaggtgtgagccacagccttcttcactctttttcagggacaagacatagtggctcatacctataatcacagctctttggaagattgaggtgggacgattacttgaggtcaggagtacaagaccagcctaggaaacagcaaaacccccatctctacaaaaaataaaaaataaaaataacatttcggggggggctcctagcatgcactaaactgtaggaatataaacaatgaataaaagtaggtctccctctccaagaaggcacagtttaagggggaatactgacagaccaacagataattttaatatcatgcaaagctctctttggaacacatccagtggaatttgtagacaaatttcagatcaatttagtaacacctatcagagtttttaaaatttatttttatacaaggtcttgctcttttggcctccgaaagtgctgggattacaggcgtgacacaccgcaccgggctccatatatatcagcagcaaccatatatcacatgagagtatgagaggaataaatgagctactagtcactctatttatattaacataaataaatatatattaatatacacacacacacataggatctctgtcacccaggctggagtgcagtggcacaatcatagctcaccgcagcctcaaactcctgagctcaagtgattctcttgcctctacctcctaaagtgctgggatttcaggaaagagccaccttgcccaggcttcctatgccaccttaatggcaacagaaaccctaggctcagagaggttaagtcacttgtataatttcacacagctggtaagtggtcaggtctagagtccaccacagaccatgtgcttccagttgttttgctgtatacgtccactaaataataatcatagcaaaaatagtaatggtataataacagtggcagaggcatcaggaacagcagcaaccatcatttccaagtgccaggcccagtacgtaagactatccccattcatttatttttacttatttttgagacagggtctcgctctgtcacccaggctggagtgcagtggtgcaatctcggcttactgcagcctcaacttcccagggtcaagcgatcctcccacctcagcctccctagtagctgggactacaggtgcgaaccaccacgcttagctaatttttttttttttttttgagacagagtctcactctgttgcccaggctggtgtgcagtggcacaatcttggctcactgcaacctccgcctcctgggttcaagcgattctcctgcctcagcctcctgagtagctgggactacaggctcgtgccaccacgcctggctaattttttgtatttttagtggagacggggtttcaccatgttagccaggatggtctcgatctcctgacgtcatgatccacccgcctcggcctcccaaagtgctgggattacaggcgtgagccaccgcgctcggcctaatttttatattttttgtagagatggagtctcactctgtctcccaggctggtctcgaactcctgagttcaagcagttctcccgcctcagcctctgagtgttgggattacaggtgtgaccaccgcgccgagccccactccctttttaaaccaatgcacagggagcatctactatgtgcgaggcaccctccattttacagatggggaaactgagttccaagcagcttttgccaggagtgggagcgcaccgtccctgcccagtctctccagttgggcgttccgagaccacctatgtagggtattcggctagcgctcaattaaaccgaaacaccgtcgcagcgaccacaggtgcagaccaccaagtccacaccgccagccgcccgggcgtccccaattagcagttggggcgggaccaagtcctcgagctgccgccgcagcggcggttgaaagccccaccccctgcgcgtgcgcggtgcgcgtcccgtcttcctgctgggcaccaggcgcccgcgaagagcgcgcgcgcttccgccggcgtcgggctcgcgcacgcgcacggcgacggcggcggtggcggcagttcctgctctaggctgcgagcggctggcggcttcgaggggagctgaggcgcggaggggctcggcggcagcggcggcggctcggcactgttacctctcggtccggctggcgccggggcgcgcggtttggtcctttccgggcgcgcgggggcgacagcggcagcgacccgaggcctgcggcctaggcctcagcgcggcggcgggctcgagtgcagcgcggaaccggcccgagggccctacccggaggcaccatgagcgtggaggcgtacgggcccagctcgcagactctcactttcctggacacggaggaggccgagctgcttggcgccgacacacagggctccgagttcgagttcaccgactttactcttcctagccagacgcagacgccccccggcggccccggcggcccgggcggtggcggcgcgggaggcccgggcggcgcgggcgcgggcgctgcggcgggacagctcgacgcgcaggtgagcggcacatggcggtgccggaagcccgggcccggcctcggcgcctgagacctgccccgaactcgcctcgggcccggcctgtgtttggccggagtcccccatcgcggccgggcctggggcgatctgccccgggtcccctactctggctcggcctgagcttacctgccccaggtcctgcaatctgcccgggcctggcctgatctgccccgggtcccccgctccggccgcgacctggctgagttccttcggcccccaactcctgggccgggcagacttgcctcgagtcctccacttcgttcgggaccgagctaacctgaccctgttcctttacgccagctgggtttgctccccctcctgggcccgggctgacctgccttgtgtcccacaatcagtctggcctggagtaacctgccccctgacttatctgagttcttccattccatccgggctagggtgacctgccctggtccctctttcgcaggtctcggtattctgcctcgagttctcctacgacctgggccgggtcttgctcaggccggagcttgagtgacttccctcagtccctttccgggagtatccagggtgacctgccctaatcctgtctctggcctggtccgggggtcctgcccggtctccccattggtgggtctggccgcctgtcccacctcccatctgtggtcgcagccatctgggcaccccacctttcacagtcacggagcgtaggttcgactttccccatgcataggggcgctggccagcggaaggttgaggcagagaagaatttttgcctcccatggaggagcacatattggctggctattaagatcattcaggaagcaggttgtattttgttttttcttgcatcgcctgttgctgaaaccgacctgttacataacttcacaactcttgccttggaaaagttgggtttgagttttgttcttccaataagacagcaataatggctttacataaacgagtctgccacgttggaaacttatttttaatgatgtggatgtttagagaaggttacttaggtattttaaatgggggcttgggttgggagaagtatcgggcatgcatttcctggtcctgggcgctgcttgcctggggtgggagaggggctgggggggtggcgcgtgttgcaccggggtcctggggaatgtcctcatcaccctctggatttcaggttgctttcaccttaggcttgctttgtgcctgacctctcgctcaggtttgttttcctgaatgctccgacaggaagaagctccgaggcttaccttggcacaggtgtcccttggcatatgctggtgtttcagaactgggggaaccactccttgctcatccagagtgagctcagaccctgtccttgcatggggggcttacgtggtagtcgattgagtcactctcgtgggtagaccacccacttgggctttcttttagcccctaatggaagcaaaaaacatttgactcattctaaccccatattccttaaaatagaaggtggggtgtgaggagaacaggtgtgcacgtatgggtgtttttttcagttttgtttacattttgcgaagggagggagggagagaggagagttctcctgaagaagggagtctgagctgcggaggccccacctccttgtagttttcatgccctgtagacctttctgcttccgcagctgtgaaatgggggtggcagttagatttttattccttttaaacataaaggaaacctagatccatgtgtgagtcgactgtatacgctgtctgtaatctgacgtccagcctgtcggggagactcggtaaagatctctgtggagcagtgagccatgagcgtgacagcgcggatcggggggttggctgggtgtgaaaggtaatcattttcttgtgaatccttttaactgtagcgagcataaaacagcaaacctggggcagcctttagttctgcttttgtttctggcattccgtttgggattaattgtggggcatgtccttctctttcagttgaaacaattgattttttttcctgcacctgaacacactgggctgtacaaaaggagagcattaaaacgctcccctggaggtaaacattgcagttgagctcactagaattctgacgacatcagagggtttgtcctgtgctacttgtaattgacccagatgccccacccacctgttacctgtaatttggatttgtttgtggggaatgggagtggtacccctttgcatcacaaggggaagaacggaatttgggggcaaggaagtctatgaatatcattcaagggaaagcggaagaaagttatctcttgtgtgaattgaaggcagtgtctgctaagatatttgggaagactttccctgtttgtcctcaggagttggccgtgtaaccagctgttaagttgggggctcctggaaactctcattctgcttttttaatttttattttactggggaagtggctatcagctgtcaagtgccctgcagtcacttttgcttagcggctttattgaaatagaattcacttgccacaacatacaatttacccatataaagtgtacagttcggcggcttttatttagtatattcagagttgtgcagccattaccacagtaaactttagaacatttttgtcaccccagagataaaccctgcaccccttagcccatccgtcctacctccacagcccctggcaaccactcacctgctttctgtctcaagatgtgcctgttctgggcatttcacatcaacggaatcatatcatatatggtgttttgtgtctggctcctttcactctgcgtgatgtgtgagaagtagctacaaggtgagcttcgtagctgttccctggccgagcattcaggaaaatgaacctgatcgaggttcatccacgctgtggtatgtgtcatcatttcattccttttttttttttgagacagagtctcgctctgttgcccaggctggggtgcagtggcgtgatcttggctcactgcaacctgtgcctcccaggttcaagcgattctcctgcctcagcctccccagtagctgggattacaggtgcacaccaccatgccccggctaatttttgtatttttagtagagacggggtttcaccatgttggccagatggtcttgatttcctgaccatgtggtccacttgcctcggcctcccaaagtgctgggattacaagcatgagccaccgcacctggccagcatttcattcctttttaaggctgagtaatattccatgggtggaatggtccagatggatggaccatgttttgtttatctcgtcatctgttgatggacatttgggttgtttccacctcttggcttttgtgaatagcactgctgtggccatgagtgtacaggtttctgcgtggatgtgtttatagacctgctgggccgcgtagtaaccttgggtttaatggtttcagtaactgcaagactgttttccagtgtgtagccactttccataccaaccctacctgaactggttttgcgcagttggttttcccttaatgtgtgttgaaagacagtgtgtccccaccgggatgggaaagtggcagcaggggtgactccctgcactcagagctggttcagataacactccttttcttgtttatgaaatgaaactgatatttatcaaagcccttgagatcctgggatgaaaagcgctgacacagtattgccaagtgtccttaagatacagggacagttttcgagcatctgaccttttcctgggcccttctctgctgccacttctcctgctcccaggacagtgaaggtaatttcagaagtcctttgcataatagctggtgttacaagccttttggtctgcctggttggaatatttcctcttgactgtagcttctgccctggatcctccaaacgggaactagagtgaaactcttaagagttggaaatactgctcagtattaagaaggaacaaactattgatacctgcaacaacatggatgtgtctcataataattacttttttgtatgtgtcattcatcatatgatttaattcataaaaaaattctagaaattgccagctagcctgcagcaatagaaagcagaccagtggtggctggacagaaaggtgggaaaggggaggcaggtgacaaagggcacaggaaacttgggggtaatggacgtttttattatcgtgattgtagtgatagttttatgggtgtttaagtacattgatgtatgtcagtttctaaaatggcacactaaacatttgcagcttatggtatgtcagttatgcctcaatgaaactggaaagaaaagtcagggagataccactatccacccatttttttttttttttttttttggagacggagtctcgctctgttgcctaggctggagtgcagtggcacaatcttggctcactgcaacctccacctcctgggttcaagcgattctcctgccctagcctctcgagtagctgggactacaggtgtgtgctaccatgcccggctaattttttgtatttttatagaggcagggtttcaccatgttagtcaggatggtcttgatctcctgacctcgtgttccgccctcctctacctcctaaagtgctgggattacagccgtgagccactgcgcccagcctgccatactttttttaaaaggctgaaagtgctacttgggttttttgtttttgttttaaggcaaagtctcattctgtcacccaggctgtagtgcagtggcgttatcatgggtcactgcagcctcgacctcctgggctcaagcgatccttccacctcagcctcccaagtagctgggactacaggtgtgtgccaccacgtctggctgatttttctttttttgtagagatggggttttgccatgttacccaggctggtcttgaactcctgggctcaagagatcctctcacctcaggcctcccaagtgttggaattacagagtgagccattgagcctggcaaaagtgctgcctggaactctcatgccatacacctacctgtgacctagcagagatgaaggtgtgtgtacgcagggctgcgccaaatgctgacagcatctcttcatgagaaccccaaaccggaagcagccccagtggccatcagcagatgaatgggtaaacaaagcagtgtgtacatccagtgggaaaaatgtgtgcctattggtttgagttgcttttcttagctcacctgaaagtatgaggtctgtgggtaggtacagaccttttaggcagcaacacgcatgtttttgtgcaggtgctctgggtgaccttgtagatagatgctgcttggtactggtcccactttgttccttcatcctcaggtcaggtctgcactgcctgttccgtctccactcctggtagcctgtgggagtcacagctgaatagtcatctcgtactgggattttactctgagtgcatgagttgtttccctaggaaaaacatgctgtctttctggatcgtaagggacaactagctaaagctcctagccgacctgtcgtccagccctcactctcctcctgccagacttctctgtattgcctccacttctctgagtgtgtaaacctgggctcacttttccttttgaagtggtaaaatactcaggatagaaagttgctactttgtcttcaaagccattgtcctgacctatccttgactgtccaggtgaacacaccatcttctgctgagccctgagattatgaccaaggcggggtgagttccatacagtcttgggttccgaaaagtggtgagtttaaaatctgcacatgtagctgggcacgatggcccatgcctgtaatcccagtactttgggaggctgaggcaggcagatcatttgagctcaggagtttgagaccagcctgggcaaaatgtccatgatcgcaccactgcactccagcctgggtgacagagtgagaccttgtcttaataaaaagaagaaaatccaggccgggcttggtggctcacgcctgtaatctcagcactttgagaggcagaggcaggtgaatcaccggaggtcaggagttccagaccagcttgaccaacatggagaaatcctgtctctactaaaaatacaaaattagctgggtatagtggcacatgcctgtaatcccagttacttgggaggctgaggcaggagaatcgcttgaacccgggaggtggaggttgcggtgagctgagattgtgccattgcactccagcctgggcaacaagagcaaaactccatcttaaaaaaaaaaaatgctcatgacttcattttggctttttgaatcctctggtagcccaggtgtggttttagggtgccagaacattggagataagatgccgtttacctggaggagtgttggcaagtgtttggtcagcacttaccccttagtagacttactgagtgtgttttcaaattgttaggagtttcccagtgattatgtgaaagtgacctgagctgacactttacagttagtggtgaatacacgaaacaatttctatttttatcacaattaattacccggattcaggatgacggggtgggggattatgactaatactataccaggactaactaaaaaaagagttccctctcagcctagctaccaccaccacaaaagcttaccaccatcagctaccaccacatttctctcattgcttgattgaagtctgatgacctaccagggaacccccttcttttctttttagacggagtctcgcactgtcgcccaggctggagtgcagtggcgcgatcttggctcactacaacctctgcctcccgggtttaagtgattttcctgcctcagcctcccgagtagctgggattacaggtgcgcaccaccatgcccaactaatttttttgtatttttagtagagacggggtttcaccatgttggccaggctggtctggagctcctgacctcaggtgatctgcccaccttggccttccaaggtgctgagattacaggcatgagccaccacacctggcccctttaagtatagaacttagtgctgttttagtaaatttacggaattgggcagccaccacagcagtgccttgctgtctctgatttctctttcgctcctttccgctccctccccaccaccccttgtcagaccctgtgctcatgcccaaggtcacccgttagggaggtgtgtccaccgcctcagactgagccctgccctggggaggtcagaaacatggccaagccctggccccatgctcccccgcctttaagccccgtgtctgttaacttttgcaccctctgcgagctgctgggcaacctcttcagcctggccctggacttcagccatcccctgctgttttcttacttcctggccttgctgtgcttgtgggactgagggcagtgaggccagcagagggagagtgaagcctttgacccccgcggttgcactgttagaagacagcacatgccgcctggccagggtgctgtgagggccccaggagtaggagtgggctcccctgctaagggaaagcctgtgggaatggcgcctctggagttgttcagaagctgtacctgccaggcagaggggtgggcacagcactttgcctagaaggagggagggtggatgtggggccagtggggccagggcaggggctgggctgtgtcctggagcctttaggagctgctggggtgccttgaccaaggctgggaggagggctctgagatggcagtggcgggggttaggggaggggctgtggtgttggaggttgggcattgtggcccaggttggaccccgaatggatggaggggccacagggcagtggagacggaggacaccgggatcagggctgtgtgtgtacatgtgtgtatgcatgagtaagtgtgtaagtgtgtgtgcctgtgggaactgccagggtaccggctgccccctcccagtcctcacagggagccacagacttaaaaagcagctccagctcctgcctgtggtctcatcagggtccataattccccaggctgagccggggctctctccgctggggaggcaccgtcctgagggccttgtgagagggagaggcctccccagagcggctgcaaggaagctaaagggcacatgctgggcagcagctcacaactgaggggcagtttgtgcttgtcatggtggtgagagtgctttcatggtggtcgggatagtctagcttggcagagaagggccgtgacacccagctgtgctctgtggcattcagggccgaggggcctggctggaggggctggtgggaggagtgggtccgggccctggcaccagtgctgttcggggctccggagggttcatggccttgagctctccttgctggagcacatacctatgagagcaaagttctgctttctctgatacatggagggctgctgggtcctggagtctggtggctggcagcaggtccttgtgcctttttctgtgttggtcgaatagcagcttaagagccgggtaacccagccgggcttctcaggtcccgtgggcctttgccaggatggtgtctagatgtgtaaaggtggctcgttgggctctagagagcccttgtgacagtgagcatggcatcttcctgaagcatcagctccttgcagagcgagtgcaggctcctggcggccctgggagagggggttgcagatcccaggcagaggtgtttggtcagagctgcgctgcctgcaccgtcctcacctctttttcagtacggggatccatgcgcatagcttgcagccctgctgcatcctccgtgtagaaacgtctacgatgaattctctaacatacaagagctggtgagccctgtgcctccgtctccctgatgagacagttgtgaaggttttcttctccctgttttctttttttttcttcactggtgtgtgtttttaaagcaagtcttttgtgtcctttcacctttgtgtctgaggtggagccctgtgaattggcgatactcagccattttgacctgcagtatgtagtatgcatttctagaagcagaaaagggcgcctgtcctgaatagctgcagcgccgttatcacacaagcagcgtcaacaatggcttttcacgattgtccgatatgtagggacagttggcctctctccacagcagattctttactgggatcctggaggtccgctgttgagatgatggctgtctctgggccctgcgttccgagcggcctctcccgctgcttttcatctcgccaagctgcagtctggcctgggttgttgtcctgtgaggtgtgcaccttctggactgaacccctcattgtcacacttcagcttcttgctgaaggtgtggagtggatttcatctcaggctgtgggctccagggagagtggctgatccccgggctgggaaggcaggggcggcctgaggtgagctggggatgccttgcacactcggcccgttgaaatgaacctcacgcggactctagcacacctggctggaacaagggtctgccggtccacacaggtgccattggtgagaggggaggcgagaggccctttctctttgggaagaacgaatgtgagcctaggcaacatattgaaaaattaaaaaactttctaggcattgtgcacacctgtagtctcagctacttgggacgctgaggcaagaggatctcttttaagttcaggagtttgaggatgcagtgagctatgattctaccactgcactccagcctgggtggcagagcaagaccctgtctcaaaaaaataaaggaatggagagcctggggaccgctgtgtcgggtggtgggactatgtgaaagatggtcaactcctagcagtttcacgtggttcaaactaatagattaaaggtggctaaagagacatcacaaatcacgtgcagtcattaactgggacttggattcttaaaaacctgtaaaagacgttatgaagacattggggtgatgggtgaatgtgtattaaccaacagtgtggcaggctgggtgcgctcatgagccagctgttttgtggggatgtggagaaagccctcccctggggccggccactctgaaatgggtcaggaagagataagtgtgtgagagcaaggggagtcggagtgcagggggatgtgatggagagtgtccagctggaggggtgtgggggtcggatttctgtagctttggaatttttcaaaataagaggaaatatcagggcagaatccttccagtttgggggccagacctcctggcaaccctctgccttgagagggctcagagaccctgcagcttcttggcagtcatcactctgagggtgtggtgaacttcctattccctcccctttttttcctttacaatttttttaattaaaaaaaatttgggggggtgctgggtgcagtggctcacacctgtaatcccagcattttgggaggccaaggtgggtggatcacctgaggttgggagttcgagaccagccagaccaacatggagaaaccctgtctctactaaaaataggcgtggtggcgcatgcctgtaatcccagctacttgggaggctgaggcaggagaatcgcttgaacccgggaggcagaggttgcggtgagccgagatcgcgccattgcactccagcgtaggcaacgagagtgaaactccgtctcaaaaaaaaaaaaaatttaaatagagatggggcctcactatcttgcccaggctattctcaaaccctgggctcaagatcctcctgccttggcctcccagagtgctgggattacaggtatgagccatcacgcctggcctcctgccctctcttttatttaagccttggaattagagaatcaggaatgagctgctttgccttttgagcttggcctttagccaacaatgttgagggcctcctggggtgcaggctccatctaggtgctgggctcatggcagggagcaggacagacaatgccccacgggggccttgaggtggggtcagaggatgcctgcctgagaggcaccctgtggacctcaccctgaggctgagggaacagcaggtgcaaggcctgggtgctggcaaatgcagacagtggtgcaaatgttggagtagatgtctgcggcctgagagtttatgatggcacatttggggggatttttgagtttttgaatttctgtggttttcgtctgtgggaatgaagtgactttctttgttttttttttttttttttgagacagagtcttgctctgtgactcaggctggagtgcagtggtgtgatctcggctcactgcaacctccgcctcctgggttcaagcgattctcctgcacggggattacaggtgcgcatcaccatgcccagctaatcttttgtatttttagtagagatggggttttgccatgttggccaggcttgtgtgtgtgtgtgtgtgtgtgtgtgtgtgtgtgttgttgttaagagagacagggtcttggtctgttgctcaggctaaagttcagtggtaccatcatagctcacagcggccttgacctgctggggtcaagcaatcctccggcctcaacctcctgattagctgggactacaagtgtgcgccaccacacctggctcgtttgtgtatttttttgtggagacaggatcttggctgtgttgcccaggctggtcttgagaactcccgggctcaagcgatcctcccaaagtgttgggatgacaggtgtgagccaccattcctagccttgaagtgacctactgttgtgctgccctgatgcacggtctgagttctggagcatgtctctgggcagaaagcccctgtacagctcttagatggacttccaggatgtggttttagtcgtagctaggttcacatccagaactaaaggagttagagactccagctctggggcctcgtgtatgactaggaagtgggaattctaggatacgtctttaaatactgtgtccagagcagaggtgatgggaggagctgctttttttgggggccgggggggggtttgggtttttcttttttctttttttttttgagatggagttttgctcttgttgcccaaggtggagcgtgcagtggcacggtctcagctcactgcaacctgcgcctcctgggttcaagcaattctcctgtctcagcctcccaagtagctgagattacaggcacgtgccaccacgtccagctaattttttttttttttgcctttttagtaaaaacgaggtttcaccatgttggccaggctggtctcgaactcctgacctcaggtgatccgccctgccgaggagctgcttcttggtgaatgcctgggatgggtacagggaggccttgcccctccagagcctccctggtgaggggataagttgacagcctcaaaggactttattggagtggcagctctgtgccagctgaagatgatgaccctcttgtccttcacccatcatgtcccctggcgtgggctgtggaacttctctgtgccaggcactgtcccctactgctgttttacctcatttcatgatagttcctagggtcaaatatatttttgaaattaatgttttatcttgaaacttttcagagagtgaagggagaagttaacccagaagtcagcttgtgttgtgaccagatcactgcagggcagcattgggcccagtgtgcatctgtgcgtgcaggtagcacgtgcccatgcaccccagccaggcgggctggaggggcctctgtggggtgctgctccccatgagcacctgtccctaggctcgcacaggtgctgcatcacacagcaagggcattaggccgaggggctgtctggggtgctgggactggcagtgggagatttggtgccgtccctaggggagctcccatcactcctccctggcccttaattttgtgccaccttgtgttctgccatgacacagtgctcccgctgcctgaccccgtggtggggttaggtggcctatgggggccatgccagggactgttggccatgtcatttgaggtgctggtacttgggagtggcatgaggagccccagtggctgtgtggtctccttgcaagtgtcctgtgcagttgtggcctgatgacttagagccatgcgctgtctgcctttgctgaacatagaagaggcgccttcagtgagggtgtggcctcggttgccaagggtatctcagtgttcagtttctacttcatcctcaggagagggctgccttgaagggatggggagggtgaggtggcagtggatgtggccagtgacatttccacatctgcatgggtggcagcttcgtagtgtttgatgagccttacactgtggtgggtctggcatcatgaagctgtcctcagggcacactgctgtcagtctgtaaaagtcaccctgctccttgtggtcctcagtcatgggaaagaagcatcttcctaagcatcctggttgtgggcatggacatggctctgtggctaggcgggggttagaccagctgtgtgggggaccggggggtgtagaaggccaccagtggcccttttttggccaggtaggtttgctagagaagagtgaaatccagtcagaacaagggaaactgtctcaaagcagagatgaggccagggtgtcacaccagagtcatcgaggctggttcttctgcactgagtcctggaagctgcagcctcactcaggtgacactgcgttctgctgcaggttgggcccgaaggcatcctgcagaacggggctgtggacgacagtgtagccaagaccagccagttgttggctgagttgaacttcgaggaagatgaagaagacacctattacacgaaggacctccccatacacgcctgcaggtgagctgagctcagctgggcctgggcatgtgctggacaggtgggtgcctctggcatgggcctgggacactcacctcccaggtacagggtggcgcccttgtgctgtgactctgggtggcggtgtcctcgggagtaaggaaattgctcaggccatgtgcacagccaaggcctgttaccggtcaggaggtgggctcagcaacctccgacaccctgaattcaccagctggtgggaaaagttttccttcctttggcctcctcagaccctgggggcattgcctggtacctgcgcactcactcatagaaagaatttgtcatggcattgggtgagcatctggggtgggagggtgagtggagcagctgagataccctcacaaagcagttgctgcagggttctggggcatccctgcctcccgctgccttggccgtgcctggagaattggatgtgaagacagtagttagtggatagacctgcatgttgacaaatttagaattctcatctcgagtgggatcgtcccttgttgaggcttatttctgtatttttgtgacacacaagtgaggaaatgtagattagaagaggggagaaggttttggccaggcacggtggctcactcctgtaatcccagcactttgggaggccgaggtgggcagatcacgaggtcaggagatcgagaccatcctggctaacacggtgaaaccctgtctccactaaaaatacaaaaaattagccaagcatggtggcgggcgcctgtagtcccagctagctacttgggaggctgaggcaggagaatgacatgaacccgggaggcggaggttgtagtgagccgagatcgcaccactgcactccagcctgagcgacagtcacggcaggtttgggcctgagccctgcctctgtctgtgggcacccacttggggccctccctgcagctccttgcccgcgtgctgcccagcgctccgggactgaggctgctcttcgctaggcttggtgggcaggcactctttcctgcatctcagctcttcactcattctcatttacagatgttttcgtgtatgtaattgtgttctcttaacacacagagatggccataagtcctggtgcagctctggggagctagtatttttgggtttggtatgtggattttcagaaaaccacagccagtggtggggtgaggctctcccgaggctcctcgcttgggcttcggggcctgagcttcagggcgctgctgctgcagggtctgtgcccagctccctgggagcacagtgccctctgctggagcccagagttcaccatgaccactgggtctgaggctggattcctgaatttcaggccaaagaacggggactagaatggccctggaggagtgaggcctccttccagcaggactctccttggaggtggctttgctccttatcccctcggagcttctgccacataccccttccctgcattcttggatttgagaagccctggttaactggtttgatttggttactgggattgttggggttgagtatgtgtttaatgaagaacttaaaaatgttgtcagaggaaagaatttcacatcttgccaaatgaaaaccagagagcaagcttccagctgtaactgtcgctgttttgattttttagttactgtggaatacacgatcctgcctgcgtggtttactgtaataccagcaagaagtggttctgcaacggacgtggaaatacttctggcaggtagataatcagaccatgcatgtgtgtttaatcagtgctgtgctcagatttgtgtgtaaattatggaaatgttgaagcaaagcgtaatataaaatcacgctaacaaacctgggttttttcctcctctgtgactggtttaacttgaaacagatggtggtgtgtgaatgccttaatgtatttacccttgatttattctctgtggctctttttattatgcaagtagggttggcttaattctccttcccagtttttatttcgatttttctgcaagatgagctcttggcacacccgctgatcttcattaacgggaggatgttcccaaggcagtaacgggcatccaggggcgctggttcctgagcaagcttgctctggcctgagctcatcggagctgtccggaggctaattcaggccagatcctgaatcatcggcttcaattaagttcacttgaccgtcggcgctgggcttgccttcctgatgttgatcagctgcagctggactgtgtcgcttgttctgtgtttgggacaggacagtgttctcccagtgcccaaattccaaggggggagttcgatggtcttgcccgagtggtgggactctcgtcctggtgggtcccgtgctagcggctccccttcccctccaggttgctgtgtacaggtcactccactgctggagaggatggagcagagcctgggaggcagagctccgaggtgctagcaaggaagtgtggggtctttttctgaggttcacgttctggagaaagaaaatgaccaaagcccggaggcaggcttacttgtgctgacacaagcccctcctgtgcctttgacagctgtgggtctcggagggttacagatggagcagtcagatctcgtggcatctctgagttagtaacttgaaatatggtgttatgagcaaggccagaaaggggctgctgtttttaaaagattttaaagaagggtatcttctggataaccaaaagacattcttgtcccattttcagaatcttctgggtaatttaagtgttgctatgtttgcatttagttcctcttgttcaggaaaagcaactaaataaaacttctcttagctggcaaccccagcttccggtcagcatagccaagaacagggaagtgagcaaaagggcctctgagaaacaacaggcttgagccaagcaccactgagcattctgtgcgaggcccaggggaaggtgaggaagcagccgctggcccttagggatcttggctgtgacagggtgaggatgcatgagaagacacggagacagctgattctgcccacgtggccggcagggctccagagtggagtcgggctttggagatgctcagagtggccatggctggttagagaatcctgggcctcgtggcagggagaagggttagaagattagctgagctgaagcttttggcaagaatggttttccagaggggaagagagagggcgcggtgaggaaggctgggaggccctgcaggcgtgttcagagctgctggagacaccggaagagcccaaaggcagagcagctgggcatccttgttagatacggcagataggtgctggagggtggctggcttggcacagggcagggttcagcccagaccgcggtttaggtgagcagtgtcctggccacgtcgcagcaaggaaggagccgagccagccagggcttcacacacagccctgggcttctgtagaaccgcccccgcctctgctcaacctttttgctgctttttgcgggggtttccagtcgcctgcttatcagatttcccggcctgcagcaaagcaggagggactgttgctcctggaagtaggcacagggcctctgaggagtgatttcagaagaagccacagaagatggtggcgggggttgaccttggaaagaaggggctggggccttgtgggaaatgtctctgaccccacagcagccctgggccaacaatgggttaaattaggcctgataagttggatttaagaaagcaggatttttaaaaaaggcaggaactatgtgaaccgtgttaaggaagttttccttaaagtggttcaagttgggattgatttttgtgctcagtggggagctagtttgggggagggctggcccccagagatgccagatggatgaggtgtgactgcctctgctaatggaccgtgaacggtaccggaacttttaacaggggcccgaaaattggaagtggtgaaaagccaaattttgggtgttaaccgtttatcatttcctggtttcagccacattgtaaatcaccttgtgagggcaaaatgcaaagaggtgaccctgcacaaggacgggcccctgggggagacagtcctggagtgctacaactgcggctgtcgcaacgtcttcctcctcggcttcatcccggccaaagctgactcagtggtggtgctgctgtgcaggtgagtggtccccagatgtctcctgggggtgacctttaagctccagccgtctcctcacaagccttggcccagcccagcccagccgtggctctaactccagggagttgtcctccaaagatggtttttgctgaagggtgaggcatgagagcgtttaggcgctgaggcttgttaaggagtcggcagtgccgtgtaactcttttggggcgttctggctaagtcataaaaacaattctgtaaaaacaaagtctgttctgagttttaagagttcagagctcaagtgcacagggagatgcgatttattactaacagtttgaaggtaatgtgatcacataataaaatgcagggcatgcccctttgggtgaaaggtcagcatgggagggggccctccctgctccggggcttcagggacgggagctggtcctcacggccccctcccgctctgcaggcagccctgtgccagccagagcagcctcaaggacatcaactgggacagctcgcagtggcagccgctgatccaggaccgctgcttcctgtcctggctggtcaagatcccctccgagcaggagcagctgcgggcacgccagatcacggcacagcagatcaacaagctggaggagctgtggaaggtggggctgcccagcgggccgacccgtgccttcgtgtggtttctggttgcggggaggggagtgtcttcagagacggcttgacccagtgagaccgctggagattctctgaaaggaattcaggcagacctctgccacctctacgtggaatgacctcagggcaccttggtcaccttccatccaggcagccttacctgaccgagaagatcctggccttggggaaaggaaagctctggctgctggaatttttcttgtcttgccggggtgaggatgggtggtgggaggggaagaatggggctggctgtgggcagacttgtcctgcagagcctgaacctgcccagacaggtgggctgcgagaatgtcctggggaaataggttggtgtcgaggtcggcacagtcagctgagacagaggggagaggagagggtgccgggtcaagtagtgggtgcctggccctccttccacagacagccctcacttttccccacggaagcctttctgtgcttccagctgtttaggattttgtgataaagtagttctaataactaggctagaagttttcatttgcctcccattcagtcagaaatctcacataggaaatgaagtgcaagttaaaatatttttttaagcattgttcagccgggtacctttccacttggattttccggttgccagatgatttcatgattcccgtttatatctgaacagcccagaaaatgtcctgtccccaccagcatggcactcactgagggagctggcccccaggggaagagctgcgggcccatgttggtctggctcagggttagcagacgtgggagacaggcctcccgggctgtggacacagcgagagaaaccggtggtctttgtggcagcctgcgaggcgggttagctgctctcgttcacaagctgggcatacttggaggaagcagctggctctgaaggtgccctctgctgtggacagtgtgtcaggctggtgcctggggctttgtaggcaggttcacccaagtaccggaaccccgctggggtgcggagcagcagctgaggcccaggcatgggccaggccggtgtgcagctccctgtgtggcatggagttcccgttcccagggttctccttgcaggtggggctgcgccagaacccctccatgccacccaccgtggcccattctgagaagcggcatgtgtgctccatccctctggtgcctctgcgccctcgttcatttgcatgtagggaaaaacaggacgagtgtggcgcggtgttgttgtcttctaggaaaacccttctgccacgctggaggacctggagaagccgggggtggacgaggagccgcagcatgtcctcctgcggtacgaggacgcctaccagtaccagaacatattcgggcccctggtcaagctggaggccgactacgacaagaagctgaaggagtcccaggtgatgtgtgcgagagggcttggcctggggtgggctctggctctcacagctctctcctcaggcttccagagggaggttttctctccaggctgtgggagctgatgtgggctgcagccgcgacacctgagagttggaacttgcggatccgggcctggcagcccggtggtctgagcccccgccctcagatctgacatcagcctcagtgttttctgtttaaatccaacacatctttcccagtggggtccacagctttgcccacagttgcgagagttagactcgggcgtgatccctgtgaagaccacatttaggcaacgggagccctggagcgctgacctcccctccctccctcccctcctctttctgtccctccctcccctcctctttctgtccctccctcccctcctctctctcttcctccctcccacagcagctgctccctggccacggaggcctctggtgtgcggtgaagcctccagacgggattggcctgtgtgtgttccggggactcctaatggcttctctttcagatgtgcccttggtggcatttggggctgcaggtgccactcacggcgcctgctctcacggcagaggcttgctgtagggcccgcctcatggggcctcgggcatgtggaggccaggcccgggcctgtgctggaggctaaccggggctcttgtttttcatgtgctcagactcaagataacatcactgtcaggtgggacctgggccttaacaagaagagaatcgcctacttcactttgcccaagactgactctggtaatgaggatttagtcataatttggttaagaggtgattttaagttttaaaatatttgtgaccataagtagcataaattcctagttccacccttgtaaagtgccccttaatttgaactctccctggtggaagcgacggcgtgggttaaaatggccacctctctcacttttttacctcaagacatgcggctcatgcagggggatgagatatgcctgcggtacaaaggggaccttgcgcccctgtggaaagggatcggccacgtcatcaaggtccctgatagtatccttcatgtgaagagggtgtggccggctggtgggagaggaaagtgggggcatcaggtggaggccactgtggatttgatgctcactgctgggccagcatctcatgctctgtggtgggtgctggttggcatcgccctccactgctcttaggagaatcacagggccttcaccttcaggggacagctggttgtatggttgcttcccctctgcccgaatggtgatgttggtgatgccacttgtgtggcgcgtccctgggctgactctggaagttaatgtatgccgcttgtgtggcacgtccctggactgactctggaggttaatgtggctgcaggagcgccttacctggacgctgactctgcacacggaggttccagaagccagtggtcacatgcagaccctctgagcacacacttgctcccaggccatgtttgggaatgtgcagtgacctcatggtgatgcagcctgccggccagagtggggcagctgtaaggcacaggtgcagtcagaggcttgggtggggaggagtcctgggagaagacaccgcgggtcagactcaggctgcctcttggtgactggccaatgctgctggggcctgaccattcagcggtggcctccacaggggtagggagagttgtctcccacacccaccctgggcctgacaagctcatcctgaacacgtgagaccggttttggggctcggggtcgagggaagggtgttgcctaccggccacagcctcctggagggcagtttgcttgtgtatgtggagccttttgcttggccgtactgggaggggtgttgtttctgtggaactgtgagaagagctgctgtggccaaagctgggttctgcgagctctgcctgcccctgctggccacatgtgcaggagctcccggtgaggtcctggggcccaggatgtggctgctccctgctggtgagcgctgctggcttcgctgccgccctctgcgtctctgaaaggggcctagatgggtggctgggagtggcaaggaggaactccaggctggctgggggtgggacaccggctcatggtgaggtagagtctttcttcaaggatgctgtccttctggtctctggtctggtgttggctgcacgtttttagcgtttggtgcagagccagcggtgtcttaagtaactaaattttaaaaacgctgtttaaagagcgtgtaccaagggtggcccagaaaggtcagcccggcttttgacaaggatgcaaacttaactcagcacacagattatggcgatgagatcgccattgagctgcggagcagcgtgggtgcacctgtggaggtgactcacaacttccaggtggattttgtgtggaagtcgacctcctttgacaggtacgtcttctcccatcactgccccctgttccctggttgccacctgtggcatctttatgagccctccccgtcactgtggagtggggttccccacccagctctgcaaactcaggatgtcggagaggcggccacagctgtgcgtgtcgccaaccccaaaccctcctcacaggatgcagagcgcattgaaaacgtttgccgtggatgagacctcggtgtctggctacatctaccacaagctgttgggccacgaggtggaggacgtaatcatcaagtgccagctgcccaagcgcttcacggcgcagggcctccccgacctcaaccactcccaggtgcgcgccgtcctcagcgcgcggggcctcgcccatgggccgggacgcaagcggaggctgcccctaacggccgcttgtattgaaggtttatgccgtgaagactgtgctgcaaagaccactgagcctgatccagggcccgccaggcacggggaagacggtgacgtcggccaccatcgtctaccacctggcccggcaaggcaacgggtagggctgacacggcccttgcgggcaagacccgggagggctttagggtggccagatggaaggcctggtgctgggagccttgggctctgtcacaccgaagagagcacgtggcgggtagtgtcgccatggtgcctaccgctctctatgtgacattattcgtgtcagctccaaccttaggattgcattttagtaaccaggtctgctactggtttagaaaactgggggcagggggggcatggctgcagcagcgtgagttccgtgtgcggcactttatagtgtggcgggatggtgcaagttccagccttggcattgcttgcggtgggtagagctgtgaagcctgggctgtctggatctgagctccttcggcatcgtgtcattactgcctgttaaaaatgtcaggagtttaaggccagcctgaacagggtgagacgtctctacaaaaaaaaaattcagaaattagctgggggtagtggcgtgcacctgtggtcccagctactcaggaggctgaggtgggaggattgcttgagcccaggatgttgaggctgcaattagctgagatcacaccactgcactccagcctgggcaacagagcaagaccctgtctcaaaaaacagagtcttggcttactacgttcaccgagcttcctctgggtaagcactgagctgccccaatggtgttgcaggccggtgctggtgtgtgctccgagcaacatcgccgtggaccagctaacggagaagatccaccagacggggctaaaggtcgtgcgcctctgcgccaagagccgtgaggccatcgactccccggtgtcttttctggccctgcacaaccagatcaggaacatggacaggtgtgtgtcgagtccatccctcccagttggtccctgagcttctgcgggtgacatgtacagaactcaggcaccctgctgacctgcatgtgcttccagcatgcctgagctgcagaagctgcagcagctgaaagacgagactggggagctgtcgtctgccgacgagaagcggtaccgggccttgaagcgcaccgcagagagagagctgctgatggtgagtgcccctcctgcctgcaaaagggcctgtgggctggcggcctgatggtttttgtttgggccaaagcacctatttgaattgttgctttgcttctggaaagagaacttagatgctctctacttggcctctctgcgctcagttgtacagtaaattagggacatctcgctgcctggaacacggtcttctagggagtctccactccctgccagcctccactgggatccggcagtggatctagaacactcctgctctttcataaccaaccagcctgaactggaatcagcctgagtgcaggttccagcagctcagcactgccccttggaggctgtcgtgaggcgcagagctcttggtgtggagaggttgccttctgtgaaacatgaccgtttaaggatcttaaaagtttgtaatcaccacagcctggaccatgtatcttgtctgggagggacagcttgttttttatagtgtcagggagggtgagaaacaggagagcttctgtgttctgtcccacctgccctccggggtctggtggcgtttacagtgcaggtgccctgatgcctctgcacccttccccagaacgcagatgtcatctgctgcacatgtgtgggcgccggtgacccgaggctggccaagatgcagttccgctccattttaatcgacgaaagcacccaggccaccgagccggagtgcatggttcccgtggtcctcggggccaagcaggtgggctgcctcccctgccctcctgtgtgaaaactcgtgtgtgtgattcttggtgtttgtcttttaaaacaccttgtattgacgtaggatgcccagcagagtgtgcgcacactgggggctccctgaggggtttatagagggtgggttctgccagctgcacgtccagtgtgcgtggtgagcaatgcccctgtggccaggtggtgtcctgtgcatcctggggcccctacttccttgctagtgtgtgttgaggctgattcacacctgagcttcttgacttgtgggggcccctgttcctacagctgatccttgtaggcgaccactgccagctgggcccagtggtgatgtgcaagaaggcggccaaggccgggctgtcacagtcgctcttcgagcgcctggtggtgctgggcatccggcccatccgcctgcaggtccagtaccggatgcaccctgcactcagcgccttcccatccaacatcttctacgagggctccctccagaatggtgtcactgcaggtaacggggctctgcccagggcaggggcttctacagagaagcggcatcaagggaatgtggactggggagaaggaactggcccatcagcttcccctgagcggcttcacatagccactgcttgaggtcagggcactttgtgcccaaggtcttgatggtatggtcttggatcaagtggtgtctctggggcatgtggggagcctgtgtcctctgtaaaactcagtcattgcctgagaattcatccaagcctcatgtggcagcatgcacagcagccaggacaggctgttaggggagctgagcccgggccttaacgtgggctgtgcattcagtgcttcatgaagaacagctgttctcagggcctgggcccctggggcccgcaagaccgtgtccggcttccctggataacacagaggcctcacctgccctttttcactctgctgacgctcacactgctggtgaccccctggtgcttctgcaagagtcagcccagagcagccagactgtgcccggatcacagtaagaaacgccctggatgaggaagtgaacagtacatcttactaagcctcgagtgtttcactgtgaccagataaaatttctcgtgacacctttgggtatgccggcgcttgaaggaagtccttgtggacacaccctgggtattcaccccaaggtgttgggcagactttttccaaaaatgatcgaacctgtcgcttcatggagaactagtggcaacatctgttacagtagtaaaattcaagtgaaaaccagaattttggaaaacttaacgtcgcttgccatgagcttggtgtcttcccaacacctagagacttttctggtgaggtctgtgggggtgacagatggaatgtttccaccattgccagtgaaatgtgtcagcctttggaagacctacttgactcggtgggagatccttcctgaatgaccagcagagtgtcacgaagtcacatggggatggagtggcaaagagttgtcacaggcctgcagaaacccacctttgtccagcttgatgtggcctcagggctggagactcccagccatgcagaaaggctgtaaaaacaaacccatctccctttccagcctcaggcatccatgaggcctggcttccccacagcgtccccagagcccaggagggtggactgagcagaggtggaccccagggcccagctgcctccgattcagccagatagtaaggagatttgcagaaatgggagacaggaccactcttcttacttagcttatttttggagaaataactaacacgtaatgggttatttttaaatgaattaatatattttttaaatttccaagtttagagaatacagttatccaataaacaaaagctgtttggactccctaacttttgagagtgtaaagggtcctgaaagctgccgacacagcgcctcatgaactccaaacctgtgaggttggtattgtcaggcctagttacaggagaaagtgaggctcagagcccaccccccgggttgggccacaccactctttgcctagcggtaggtcttgggagttgatgccactattgacatcgcagggacaccgctgttcccagcgcatggcaaggctgaaaacacaaggccacagagacctagcttgtgctctggggtgtctgagcactggctgggaaaggcgtggctcggcgcaggctcagacccctcatggtccccagggcatcggcccagagggcagacgctggtgcacactgctctctaattgatgcacagcacgtagttcacacccaggaagtacattttaggaaattctctattgaagtgtaaacatgtggccacattacaagtgtctggctcaatgagtggttactaagtgagcatatttggatagccagcacctgaacccagaaccacctgaccagctgtgagaagccgcctcatccctgcaggtggccactgtccaggggtgcgcatccacagcagcccctgggctgagggacttctgagctcatccggcggcccctgtgctcgctgtaacagcagtgatccacttggcctcattttcagctcgacgtgggatcatatgatgtgtcctggcgtgtctggcttcctctgtccatgtcaggctggtgctgtgcaaaaacaccggttttctccactgatggaagctcccagtagagtgaggagggcacctgtgaattgagaaactggttttacagttttaaggaaacgcaacagggcccagaaaagccaagatgagcatgaagagcccgaagaaagtggctgctcacatggcaggacgccccggcccccaagctgcagtgttgggccccggcccaggagggagcccagaggcagagccaccggtcaacaggccctcagcaggaatggacaaggctgcagggcagggggacactgttggctcaacagtgtcacacacaagtcagttgtaggggctgtggcgcctttaaggcaagcttctggaaggaagcaggagaatatcctgtatcctggggttggcagagatccaggctgcaagaaagccctggctgagaccctgttccctgttcaggggctgagccagctctgtgctggccatggtgctctcggtggcctctcctcagccttgcccaatcctgggcatctctggccaggggaccggctcaggtgacctcaccagggcctcacagatcgaagtctcctgccccaggacctgcagcactgtagcgtagcaactacattgccctgtgtctgaactcatttgaggcgggctagggcttttgaagtgttacttctttccctcccctcacagcggatcgtgtgaagaagggatttgacttccagtggccccaacccgataaaccgatgttcttctacgtgacccagggccaagaggagattgccagctcgggcacctcctacctgaacaggtgagcagggacaggcccaccggcgtctgcaggtcttggggacagcttgagaggttgttgacccattctacttatttttaacatgggactgaaactttttttgccttcatttcctgtttagcctgtttagactctaaaccgtgttgtttctgcctccttttccattgtacttgttttttattgggcagatacttgctaatcccacatggcagccgtttctgcccctcgagactcccctggtgaaggctggggaagctcagctgtgcaaacgccagtgatggcagctgccttcccgcagggtgttgtgtctgcacccctcacggcctccagcctcagggctcgggatcccacaggtggagcccagcactgacagcctgggtttcttaggaccgaggctgcgaacgtggagaagatcaccacgaagttgctgaaggcaggcgccaagccggaccagattggcatcatcacgccctacgagggccagcgctcctacctggtgcagtacatgcagttcagcggctccctgcacaccaagctctaccaggtgcgctgcgccctcgggcacacttggtctcctgggccatgcaagggtattgacccttgacctttaagttaccccccaagaggggcccgtcctggctggagctcagaatggcccaggaagcaccagctggcccaccctctggggagggcacagacagcacatccccacagaccctgcgaaattccacatgatcaggacagagactttgagaaatacatcacagggatcagaaacatgggctgagattggcacatcaaggtgttttctcgggatggttgaaacaagtccaaggtggaacggcagtggtctgtgcctgccacacactggatgttgtgctgtggagaccgtggtgttcacacctttattgacacccggatgaaacacccactgcgggtgtgtggggaggaggcacagctctgcctccatgaggaaatgagcccaagtgctgagtctgagtggccacatggcagtggtttctgttctgtttttgagcacggctcaggttctctgggatgagcacgtgtgctcttagtgctgagaaacaaatctccgtggctaaaagagaacaggctaggtgtcatggcccacacctggagtcccagcactttgggaggctgaggcagggaagtcgcttgaggctaggagttccagaccaacctgggcaacgtagggagaccctgcctccaccaaaaaaaaataataactgggtatggtggcatgtgtctatggtcccagctactcaggagactgaggtgggatcagctgagcctgggaggtcaaggctgcagcgagctgagattgtaccactgtactctagcctgggtgacagagcaagatcctgtctctaaaaaaagaaaacaaaacgaaatggcagcagagccaggacagcccctaggtgcggtgagcaggcgccaggccccaagctcccgggtgggatttgagggtgggtcttggtgtgtttcctgcattttggggggactgggaaggcagcctgctggctgatagtgaccacaaagctcccttccaggaggtggagatcgccagtgtggacgcctttcagggacgcgagaaggacttcatcatcctgtcctgtgtgcgggccaacgagcaccaaggcattggctttttaaatgaccccaggcgtctgaacgtggccctgaccagagcaaggtagggaggctgcctgctgcatgctgcccagccgctcatcggtcctcacttcccagggaatttggggctagggttgggggttgccagggccagaggtcagaggactctgagcagcagttgagaaacgatgtctcactggagagatctttgtttccgtgtcctgggggtttgctgtggcccctgtgcctcagcccagcaggacgtatttttccaggcccttctggtctgattcaaaataaatcttgtgtgtgtctgtcaagttgtttaatctgagaggctgtaagttttggtcctgtccactatttttggttctaaaatacaacttttgtgaactgatgatagcagaagggaccccgagaacaaggtgtccattctgtcatcccacataaaactagacatcaggccaggcatggtgtctcacacatgtaatcccagcactttgggaggccgaggcaggtggatcacctgaggtcaggtgttctcgaccagcctaacatggtgaaacctcctctctactaaatacaaaaaaatgagccgggcgtggtggcacatgcctgtaatctgagctacttgggaggctgaaacaggagaatcgcttgtacctgggaggaggaggttgtggtgagccgagattgcgccattacactccagccactgggcaacaagagcaaaactctgtctccaaaggaaaaaaaaaaacactagacagcaaggacccattcaccagctggaagttggggggacctggcctgtggctccacccagcacagggagagagcctggtgctccttccggctcatatgcgcggtggttctcctctaggtcaccatggctttgtcattggttactccctctttctaaggcgccctcttgtttggtgggcagtattgggtgggtccccccacagcttcgtgaggtgggctagaggagctgggcatcgggtcagtgccccggcctgctgggggccctgtggggccgcgtgtgccccggtgcctggaaggccgactctcttgacagcaggtcttctctccaaacgtatccacccagccaggtgtctgccatggggctgcttagagtcggccacaaaatcaacccgtgtgcagggtcagtggcttggcattgggctttggggcctgtccctgtggctggcagcctgcctgctgcccggtccacgcctctgttgccttggatttgggttctgagtgaatgcagccttgcctcttggaccgtcctgtgagacgggcagctctccacctgcgtcctcagcactgcgcccttgttgcaggtatggcgtcatcattgtgggcaacccgaaggcactatcaaagcagccgctctggaaccacctgctgaactactataaggagcagaaggtgctggtggaggggccgctcaacaacctgcgtgagagcctcatgcagttcagcaagccacggaagctggtcaacactatcaacccggtgagcgcctgcacaggacagcagggcagcacggagaaacccgggcccaaaacactgctgggaacgtgccagcttggcccgtgtgcccgtgagctgagggagggctctcctaggggagggtgggctctcctaggggagggtgggccagcccacttcttgtctcccgagccgtgtgtggcatttttggcttggggccgctaagtcctgggtggcctctgggaattgggctcagggctgctgtgctgcatgcagcagcctgggaccttggacacgggcagttggaagctttgcaagcccggggtgatctggtagtgagggggtgtgaagcttcctgagctgaggcccaagggtcagcatcagagcccaggtctgccgaggagggcaggcgagacccagaggccatgagacagcagctccctcctgtctccagggagagcccctggcacagtgtcaacacctcacagctgcatacctgccacctcccaggccaccgggcccgtgggaagttgttccttctgttgagatgacaaattcctcacctatctaaaccttcgcagggagcccgcttcatgaccacagccatgtatgatgcccgggaggccatcatcccaggctccgtctatgatcggagcagccagggtgagtcgctcagcaggggacctggccgaccccttgtcctcacaccgggatgctggccgttcccatggctgcagctttaggtgcccccatctttccttcccctcaagggcggtgcctggctcccttggcctccccgcccctagggcatctctagccccggaacactcctggggtgtttgtctttaaccagagtttattcatttgtgtttcctggtgatcaagctagttagctttttcttgccttttggtagggcagggactgcatgtagtacaaatagaacattttcataaaaaggattttttttttcctttggtaaatgcagggtgattttcatttattttcttttttttgtttagagacagggtctccctatgttgtccaggctggtctcaaactcctgcctcaagcagtccttctgctcagcctcccaaagtgctgggattacaggcgtgagtcactgcacctggccaatttgcaggtgtttttttttttttttttttttttggagaccgagtctcgctctgttgcccaagctggagtacagtggtgtgatcttggctcactgcaacctccccctctgggttcaagcgattctcctgccttggcctcccgagtagctgggattacaagcacccaccaccatgcccggctagtttttgtgtttttagtagaaacgaggtttcgccatgttggcctggctggtctcaaactcctgatctcaggtggtccacctcggcttcccagagtgctgggattataggcttgagccaacacgcccggccccaattttcagtttttaagatctgtgtaggccaatgattcccagcagactctcctcggggaaggtgcctgcccaagcacccagccccaggcaggctgctgtagttaacatggagtcctgcgaatccgcatcttcagcctgggcagagccaggacagatgtgcagctccggctgactggctggtggggtgggtggggtatcgctggggtttgaccgaggcaggtgacacctgccgtgttccactgtgatttgcaggccggccttccagcatgtacttccagacccatgaccagattggcatgatcagtgccggccctagccacgtggctgccatgaacattcccatccccttcaacctggtcatgccacccatgccaccgcctggctattttggacaagccaacgggcctgctgcaggtgagcatctgtggctgcggctgggtgtggccctcctgagagctcttgagggtgtgcttgtctgcgaggccctggcctccttcggatcaccctggactgctgtctttcagggcgaggcaccccgaaaggcaagactggtcgtgggggacgccagaagaaccgctttgggcttcctggacccagccagactaacctccccaacagccaagccagccaggatgtggcgtcacagcccttctctcagggcgccctgacgcagggctacatctccatgagccagccttcccagatgagccagcccggcctctcccagccggagctgtcccaggtgagcccgcccctgggacgggacttacctgagtgagggtggggctatgcacctgaaacattccctctgaagagccccagagagctggcctggcccatgtccactgtctgaattacctgtccctgggctggggtcatcagagtgggtctcctgggtcttagtttggggacgggttttccattcttttctctggggctgctgagggctgggtggatgtgagcacccttggcctgtggcttgcttacctcctgaccttgtctttcaggacagttaccttggtgacgagtttaaatcacaaatcgacgtggcgctctcacaggactccacgtaccagggagagcgggcttaccagcatggcggggtgacggggctgtcccagtattaaaaggcaagcccccctggagcaggcctggccccaccccagcctcaaggagaaggatgggagggggctctccccagggagctgcactggaggggtggtatctggaaatgtgtgctgtgcctggtgggggtcataggccctcagggccagcttggcctgtgcccttcactgctagtcagggtggctcctcaccccaccctaccccatcctgtctgctccggggaccaccgcgggacctcagtttcctcatcagagtcggggagggcagctcgggctctccctcactgtcctgtgtgctgggtacctgtggggctcaggtcgcagcctctcaccgcctcctgcccttctccctcctgacaggtggcggcggaagagctaagcaacgtggcttagtccatcagcatcttattctgggtaataaaaaataaaaataaacggatacctgttttccactgctaaaactgaagcaccactgtgtgagcaacaggaagggagagcgcacgagggagaggagccgaggccgagcgccccctgctggcccgcggcggcgaggagcagagggagcggaggaggggccggcccgcgggagccgcggccaccaggaggccccgctccgtcccatcggggctgcggccagggcggagggaggaagaccctcatctcagagtagccctttcctctgttcttttatttctttttctctttgattgaaaggggactacgtcttagcaggaaaaaaaacttcgcatttctgtgcccgagcaggctccttgcaaagacagcagcgtgcggggcagagccccgggagggcgcgtctgtccacgcctaccggacgcgccgaggtcgcgctgcctgtgttctccgagggccttcatttaaagaaaataagggtgttttgggtttttctctttgtttttttcaagattcttttaaaggagtactgaagaatactttcctaagtttgtctgtaaaatcttagcggtggacctgggagatttgagaagcttccagaaacagtttaaacaagccagcgctactggagaagaggagcaacacctgtgccgcggccggaggagttttgttgttggttttagcttccagtggcttctttctgcggggcatcaggctgctggggtagccgcccgccgagcctggaagctgctcgttctccgctggactcagaagccaagctgcttcccgcctagactcggcgcagggccccgcaccggtgaggaaggtgcttttggccccattgcgaggggccttggccaggactggccctgtggccaggaggcgagaaggtggctgttcccggattgacggctttttcccgggggcctttggaagatttggtggaaggacaagagggcctgtccctgtccccgtccccaggaggtaccgacagtccctgtgctggttagacacggagcgctgcacaccgaaagcccaaattgggagctctgcctgccggcaactttgctgatggggtgattgctgcttctggggggtaaggaaacaagttacagaaattaccgcgttctgtgtgaagggactgagggtgtggtgtcattggcagagggtcattttaggagagctgccccagcccctcgaacgcctggcttggggtgtcattctgcctggcggccaggcctccagcttcccctgccccgggcctggggctgtcactggccctgatccgaacacctccagattccggcttctacatgggacagacggggacgcacaggccaccttccttctggcagggactcttatttattcccattgctctagggctttcggtttccccttcttccggtaggccgcgtagaggcatgcaccgggtaggtttccgcggtgaccccgcggcggcctgagggacgctccctgccccatcccggctgttgggctgggccgctttgcctctgcttcgccctgtgctgtgttctccagctttgtagcagcagccttgacaaacccaggcgcactgtaccaaggcaatgtaacttttgattttcggtcaatttaagttcttttgtcaccaaatattaataaacagttttgacttcacaccaaggttggataaactgcagggggtggagggtgctggggttttgccttggctgagtgacgggttggggtgtgaaggaggccagagggagacaggcaaagcccagaagggacaggtctgccttgcaggactgaagggcgacccctgcccctgggcccttcccgtaggcagcacctgggcctgtccgggcggctccccggagtggcgcgttaggcctctggcaggtggcctggaggtggaaaggcctatccgatcaccaagactgaggggcgccctccccaccacccaggcaaggagtccaaggagaccagcggagcagaccacgcggcatttattgttgggcccgcgtccctgcccgccccgggttagcggcagccgcactcgtccaccaccatgtcctcatactgccgcagcaccacgttgtcgctgttgtcaaagaagagcacggagatgggcgacaggcgcgcgggcacgcagcagggcaggtcggcggctcccggggcggccgcgtgcatgagcgcgcgcagcacagcgtggttgagcgccggcggccccccggaccccgacagcgcgacgggcagcgcgcactgaccctggcagtagttggccaggaagccgcgcggcgcgatgacccagcggtgccagcccacctcgcggaagctcacgtacagccgccgcgcgcgacaagcgcccccggggccgccgcccaacacgggttcggcgtcgcgccgcggccgggccagggggtggcacaggcgcgggtcgagggtcaccagcagcagcgaggcctcggccaggcgcgcgcaggcggcaggggcccgggggcgtagcgccagcgccaggcggaggctgcgcggccatgaggcgttgcgagcccaagcggcgcccagcagctccgcgcgcactggcggccccagggcgggcaccaactggcggagcagcaccggcccggggtccgcgcccgcgccctggcccgcttgcgccacgctcagctcccagccgccctccggggctgccgccgccgccgccgcgaaacgcagctccaggcgggcccggctcgggcgctcagcgggttccacagccgacaggtcgaagacgactgtccactcagggcaatgccccgcggccgaggcaggctccgaggcccgggtgggcgcacctggggaggtaggaacaggaactcggctcgcgctgcgtccccggcctgcccatggggtctcggttagggacagggaggaaggtgaacgctggggctcggggcgcaccgtctgtgggaagggtgtgaagcggcggggtgggctgatggagtgggggcagggcatgagttccaaggaaggcgccctgcggggtgcggcggggggggtgggctgccctcggcggggggcataggaggaggggtggccgaagtgggagacatgagccagaacctgggcccctggggaagccatgctagggtgtggggatggcatctgcaggaaggcattagtgtcaagaggtgggggtgggcatggggtggggacagggcttcagcatcaagcagaaggactggtcttgggaaccccctgacatgtgtccccggcgtgcagcagatgacgaggaaagggtgaggtgcggtggccgaagttgctagtagcctggacagggcgggtggggaccctcggagctgctcgggcatccccgggccactctcgaggctcgccctgcgaggtctggcctccaggaccagtgtccccagcgaaagccccactcaccgcggtccgggatgtggcgcacgatgtttccggcgacccccagctcctccacgtggcacggttgcagggtgacccctggggacgtccgccgcgagccagacctggtctcctgggggtcccggcgtcgaaacaggcgccacatgaccgggggaaccggccggagcctgggggcaccctggggctcatcgcgcagtcctagagcctggagcagggcggcggctgggcctgggggcacgggggcgcgggtcaggggcagcgagggcagcagcagggccaggaggaggaggaggtggtggccgcagggaccttgctgcggcggtggcatcttcctcccaggcgatgaccagagagtgcgcagggtccgcggcggcccgggaccagtgggctgagggcggggccggtgtccccggaggggcaggggtcctggggggcgtggccgggaactggaggcaggatgagggggcggggtcccaggggaggtggcggcggccctagaggagcagagttggagggggtggaggggcggccaaggacggggagcgtggccggggtattcggggtggggccgggtccacgggggcggggccgaggggttcagaagcgcttgtccttcaccaggccgttcctcagtggcttcctgggggtcagaaccggcgcaggttagcctgggagccccacgcggccgcctggccctctttcccgcttcttctctggccgtttcacaccccctggctccttttacccggccaggcccgggcctcgccttgtggcttcctcctcgccttcaccctgcccctccttgccttcaccctgcccctccttcaacctgccccgtaggcacgtatgtcccccctggcaccctggcacttcctccttgcttccccctctccaattaaaccttcctcttcccctcctccctgcctctccaggccgctggagggcaaaacccacgtaccggcctgggcctgacaactccaccgcctccacagtgggaccctgcacatcctcctctcctctgccacccaccccacgaaggctagtccttgactccagtggccctggctggcatctgctgtctccacctacttcccttccatgttcttttattttccttttttttttttggtcttactctgtggtccaggctagagctgtggcacaacctccaaggctcaatggatcctcccacctcagcctccagagtagctgggattacaggggcacgccaccactcccagcaatttttttttttttttttttttgagacagaatcttgctctgttgcctagtctggagtgtggtggcacaatctcagctcactggaacctctgcctcctgagttcaagcgattctcctgcctcagcctcctgagtagtgtggtggcacctgccaccacacccagctaatttttgtatttttagtagagacagggtttcaccatatcacccaagctggtcttgaactcctgacctcaggtgatccgcccaccttggcctcccaaagtgctgggattacaggcgtgagccaccgtgcctggccccagctaactttttttattgtttgttgagatgaggtcgctatgttgtagaggtgaggttgctatgttgtccaggctggtctcaaactcctgggctcaagcagtcagccctcctccgcctcccaaagggcttctgtcactttaattcgctcttctcttaggctgaagctcagcttctctgcatgcatttcacagccaactggctgtccccatccaaggactgttggtctttatctgagaggagataagccttgcttggacctcccatctgtcacttgtcttctgattttgcctgtgatccttgagaccgtgagtggcgtttcttcatccacccttgtggcttctcgattcttcccataaacaaacctccgtgacacactgtccccttttggctctgggatgactccagggattccatttctgcatcgacacctttggtataaggtgggggtttgccctaaggcttatgggaaacaaagacacaccctcactgtgttttccagagggtccccgtgctttccattcctgccctccaggatggtctttagtatttgctaaaggttttaaggtcttaggttagtttctccactcagttcccacagagagtatagattcctctaatggtaaagtttagcatcctcggtgatgggtgcccccgccctggggctttttatcagagctttcctgctgattcttgtttgttttttctgcaaaagcttcaaagtgttctctacccactcagaaacagctgtcagtatttgccttttgaggtgtgggtggcggtgtacccaccttgggggagatagcttttctctgttatctttttttcttgttttgtttttttttgagatggagtctcgctctgtcgcccaggctggagtgcagtggcgcaatcttggctcactgcaacctctgcctcccaggttcacgggattctcctgcctcagcctccccagtagctgggactacaggcatgcaacaccatgcccggggtaatttttttttttttttttgagacgaagtctcgctcttgtcccccaggcgggaatgcggtggcacgatcttggctcactgcaacctctgcatcctgggttcaagtgattctcctgcctcagccccccaagtagctgggattacaggcgcctgccaccacgcccagataatttttgtatttttagtagagatgcggttttaccatgttggccaggctggtctagaactcctgacctcaggtgatccacccgcctcagcctccaaagtgctgggattacaggcgtgagcgccgcgcctggctaatttttatatttttagtagagatgggatttcaccacgttggccaggttggtctcgaactcctgacctcaggtgatccatccgcctcagcctctcaaagtgctgggatttatgggcgtgagccaccatgccgggccgagatggccttactctgatggacaccttttggcttctatccaccactgtggtgaaaagagccagagcgagtgtgcagagagagaaggatgatgcaggcactttctagatgtttcttcatagatgaggaggagagggagacagaggagacaagaccccctgggctcttgcaagggttttgccccaaattgctgtcaacaccgatagactagtgttgacactagtctatcactagagagggagtctggggtgaaattgggggctgatttgagatattttagaagatgctggaaatgtcaaacacgggagatggagaatggcactcaggggagctgcgtggctaggagagaaatgtaggagtcggtgtggattaagtgtgggtagagaaagggccccagaagagaaggaggccagccaggaggccagagagacagagcaggagtgcagagtaaataaagggcttcaagggccaggcgcagtggctcacgcctgtaatcccagcactttgggaggctgagtcaggtggatcacctgaccctaggagtttgagatcagcctgggcaacacagtgagaccccatctctacaaaaattttaaaaattagccggggccaagcatggtggctgatacctgtaatcctagcactttgggaggccaagatgggtggatcacctgaggtcaggtgttcaagaccagcctgggccaacattgtgaaacctcatctctactaaaaaaaatacaactattagccaggtgtggtgtacacgcctgtaatcccagctactcgggaggctgaggcaggagaatcgcttgaacctggaaggcggaggttgcagtgagccgagatctcaccactgtactccagcctgggtgacagagcgagactctgtctcgaaaaaaaaaaaaaaagaagaagaaggggaggggactctctggggttagcaccaagagagccacatgggagctggacaggagtggtcttcgggatggggggaggaagatggggcacagctgggtttgaggaggacccaggaggatctaggaattctgctacaagggagggaaaacaggctgatgaggccagtggtggagaagagcagagagcacgttctctcctgggttgaaatgtccttgaataggcaagctgggtgaacatccctagcctcagagagagggactgttgtccactgtagcagcagctggacatcctcacccggccacttctgctttcttggggacatgttggccagattatcagtgcaggagatgatgatgatggggacagctggtgcccaggaaccctcaggagagaagatgctcctacatgggccagatgtaggtgctgaagttcacagttttctatttttattttttgagacagggtcttgctctgttaccgcagctggggtgcagtggtgcagtcatggctcactgcagccttgacctcctgggctcaagccatcctccagcctcggcctcccaaagtgctgggattacaggtgtgagtcaccgtgcccagcccagttctttagaactgctgcaggggcagtggcaggtgcagcagaggtgaaaatgggatttacggagcattgagtgcaggtcaccagatccagagagaggtgagagtgtctcaacggatggccggtcccggcagcccctgagagggcaatggggactttggacagaggggctgagtcatgacaaggacatgggagtgaccacaaggaagctacgggcgtcagtgtaggagagaagggtactggctacccacatcaccaggggtcccctgagggccatgaggaggacagggaattcaggggaaggggtacagatgaggggaccctggaggtgaggctgctcaagaagcagcaatggggtgagatggggtgaggaagagatcaagccaattaattgctctctgatttgcttcacgcctcctgagttacctaaaagtggttctcggtcttggttttctgaagggttccaatcctgattgaattttcggaaccaggcaaagtggctcatgcctgtaatgccagcactttgggaggctgaggtgggaggattgcttgaggccatgagtttgagaccaaactgggtaatatagtgagatctcgtctctacaaaaacactttaaaattagctggatatgatggtgggtgcctgtggttccagctacttgggaggctgaggcggcaggatcacttaagcccaggaggttgaggctgcagtggactatgattgagccagtgcgctccagcgtgggcgacagagtgggaccgtctctaaaaaaaaaaaaaaagaaagaaagaaacaggctgggcgcggtggctcacgcctataatcccaacaatttgggaggctgaggcaggaggaacacttgaggtcaggagttcaagaccagcctggccaacatggtgaaaccccatttgtaaaaatacaaaaattagctgggtctggtgacacacgcctgtagtcccagctactcaggaggctgaggcaggagaattacttgaacctgggaggcggaggttgcagtgagctgagatcacaccactgcactccagcctgggcgacagagcgagacactgtctcaaaaaaaaaaaaaaaagaagcttttggattcaactgttaaaacggtaatccacctggaatcctctctctgctgtggagagctttcttttattaaacttttgctccaacctcggcctttgtggccacgttccttaattttcttggtcatgagaccacaagctcagacaacaccttagacaacaagaccagtgaccctgacctgcttcaccatgataagtgtccttatgagagagaagagagacagaaaagaagaagagaaagccctgggaagacggagactgagactggagcaatgcagccataaaacaagaaatgcctggagccaccagaagcccaagaggcaaggaggggatcctcgcttagagttcccagagggagcaccgcccagctgaccttgattttgaacatctgtcatccagaaatattagagaataagttcctgtggttttaagtcacaagcttgtgttccttttgttatagagttcctgggaaagtaacattcaatgcctttttttcactgcaacctctgcctcccgagttcaagcgattctcctgcctcagcctcctgagtagctgggattgcaggcgtgcgccatcatgcctggataatttttcgtatttttagtagagatggggtttcaccatgttagccaggctggtttccaactcctgacttcaagtgatccacctgccttggcctcccaaagtgctgggattacaggcgtgagccaccgcgcctggtcttcaatgccatttttgatggtctctcatacctgtttttaaaataaacttttttgtttgttttggtttgtcttttttctttgttttgagacagggtcttgctctgttgctctggagtatagtggtgtgatcacggctcactgcagctccctggcttaagtgatcctcccacctcagcctcctgagtagctgggactataggtgtgtgccacaacacatggctgttttttgttttgttttgttttgattgggttgtgtgtgtgtgtgtgtgtgtgtgtgtgtgtaggaactgcatatccctatattgcccaggctggtcttgaacacctggcctcaagccatcctcctgccttggcctcccaaagtgctgggattacagacgtgagccaccacgcctggccaaacttttttattttagattaattttagatttacagagatgctacaaagggagtagagggagctcctgtcacctccatccagctcccctgacattacagcttacatttccatggcacatgggttgcagctaaagaaaccgacattggtgctttgctattaactaaactctccacatgatttgaattcaccagcttcttggtgaaggtccctttcctggtccaggagcccatgctgcaggtggcatctgtctccttggtctcctctgaccctggattgttcctcggtctttccctgattcccatgatcttgacagtttctgggcatcctgacgggctcttttggaagacgtctctcagcctgactgccttcgtcccatcctgttttatacccaactgcactaactccggctgtccttggagaatcgaattctgctggtggtgcctatgggatcaatcatcacagggtgttccctgatactctctggcacttctgtacagggtgcatgctttgctgtcctagaggacatgccagctcttaccctgtgttctgatgagacatcctcagcggggacagagccagacactggtggggctgggaggtctggcttcctcttgttctgggttctgcacctccgaggatgtccccaccatgagctcactgttctacagcaagaggaccttcctggtgtctagatgtggccaaactggtgccccctttagccatcgccacctttggaagactccttggagagacctagctgatctctggagaattcccgactcaggccggctgcagtggctcatgcctgtaatcccagcagctttgggaggctaaggcatgtggaccacttgagcccaggtgtttgagaccagcctgagcaacatgaggaaaccccagctctacaaaaaatacaaaagttagcacagcatggtggtgcatgcctgtgggcccagctacttgggaggctgaggcaggaggatcacttcctgggcctgggaggcggcggttgcagcgagccgagatcgtgccactgcacactccagcctggacgacagagtgagaccctgtctcaaaaaaaaaaaaaaaaaagaattcttgactcatgctcaaaggacagcgcaatctaacaccctcaaaaggaggctcctaacgccgcatctgccagaacccatgtgaccctctgccccaatcccatctcagtcaataccagctcgagccaaaagtcttgagtcgtctttgattcttttatttctgtttcatctacacccaaggcgaatctgatgggttctcccttccaaacagggtggggggtctgacgctcctctgcctggctacagccccggatgtgttaaatgtctgcatctcgcacctcccgttccaaaaaacgtcacggagctctgagccactgcttccctgaaaccatcgttcccacgtcaccgatggcccccaccggccaaatcagagggcctggctggtcggcaccttccagggccttccacaacctcctgccccggctcctgctcaaacactcctcacgttgcctatgagacactgcacacccgactctgcttgttacccagtttggcctccgttcatccctggcccagacaccccctgcctgccccaggcctggggcttcggacaccatctggctgtcacccagggctggtgaggctcgtgggctatctccttccccaggactcccacctgggctggactgagtctgagctcccagccccagctcctgtttggccgggcagtgggctcccctgtcaaactcagaggccaggatgtctcggcccagatggagcctgggttctctctgtggcccttggcgttccttcctccccagccccactgccaccagctccagtggcgacatgggtcagaggtcgtcatccaggctggccagcaactactcctcaccacccacagggccctggctcgccactcccgccacaccagccactaggcctggccctcagtgtccctaccgctgagaccctgcctgtcgccctgcctgcccctccccagcctctccctccccttcctcactgtcctgtccttcagggtactggccacatcgtccacgcctttattgcagtctctgttttggagtaggcttggggggcagcatccgcgtcggcctcatctgctgctgggtcttgggggcctgcccacgaacacgcttggacgggtgacactaaaggagggaacgcggggtgcgggcccctccacactcactcggctttgctgggcttcaggctctgggcctcggctgtgtcatactcccgcaggtccttcagctcgtgcacctggcctgtcaacaccttggctgcaaacgccacgatgtactgcgagaggggaggggaggtgccagtgagaagaaagcccccacgccactgccctgctgacagccatgtgctcctgtcccgggccctccacacgggctgtctgccacctaacgtgcccctccccgggactgcctgaggaggggacagggattgggacgaggacgggaccgccactgtggaggagagccggggccgactcaccaggaaccagtagaggttcataagggtgagcagcagcaggagcgcattgaagaagaagtagaaggggatgtcaggcaccgtgcgcagactgcagtgactggtggcatacaggaccttgagcgggaaccagtagaggcggaaccagaacctgcggtgggaggagtcaggaggccgtgggtggagggggacggtgccctacccagtccctgtcctatcccgtcctagacccacccttgcccccttatcccatccttgcccacctctgcccacctgtttctactactgctctgtccttcccctcccctgccatgccccgcccacctcgccaaggccccacatccttccccgcctggccccccacttccctgccaggcctcacccacctcgccaaggccccacctcctccccttcccagtccctccccttctctgctaggccccacctacctcaccaaaccccacctccttccctgcccagtccctcccctttcctgccaggccccacccacctcaccaaggccccacctccttccctgcccagtccctccccttctctgccaggccccgcccacctcaccaagcccccacctccttccctgcacagcgcctccctttctctgccaggtcttccccaccacaccaaagccctacctctttctctgcctagccctaccccaaccctgcttggccccacccctggcttgctctgtattagtctagctcttccccttccatgcctggcccaacctatctcaccaggcccctccccttcctggatccacccacctcacctggcttatccttttctgcccagccccactcctagctcagttggccccacccttgtcctactcctttcctgtatagccccgccccttcagtcccacccaaatcatgaggcccctcccctgtcatgccacacacccacctcaccgggccccgcctccttccctgcctggtcccgccccttttctggacacacccacctcaccaggccacacctccctccctgcccagcactccctaccactcaccagctgaagccgaagctgaggcagcccaagtctgctgccaaggcatgcagccgatggtaggagccgccgcgggacttgaagtaaatgttgagcttggtgaactcaagctgcacgtcactgatatcgtgcaggaagagcacaaggatgcccacattgtggtacctgggggagcagcaggcagagaggagagggcagctcacattgggggacctccactctgcactaaggcccccagcagagtccctgggctacacctcaggctccccgtgggcctcttcaaagccacccttcctgcctcgcctgccctgcccatctccacttcccaggatgccctttcctcactgtcccccacttagccgtgcacccccaaccagaccctcatcttccctgcctcagtgtccccatgtggcccagggagctccctggaagtttatttttcttttgagacagggtcttgctctgtggcccaggctggggtgcagtggtgtgatcgggcccactgcagcctcaaactcctaggctcaagtgatcctcccacctcagcccccggagaagctgggactacaggaaagcaacaccacacacggctaatttttttaatttttagtagagactgggtcttgctatgttgcccagaatggcctcaaactcctgggctcaagcgatcttctcaccttggcctcccaaagtgctgggattacaggcgcgagccactgtgcccggtcttggaagttccttgctggcccctcctcatcttggtgacctctgaccctctatgacccccgactctcacaggcctggggtactctgtgtccagatcctccatgagcttgtccctcactttggacaccaccaccatgatgagacttccaggtctgtacgtgcagcctggccatcgctgcaggaaaggcctctgccgcagcccatcaggatcctttttttttttaatttttttttttttttgagacagagtcttgctcttgttgcccaggctggagcgcaatggcacgatctcagctcaccgcaacctccacctcccgggttcaagcaattctcctgcctcagccttcccaagtagctggcattacaggtatgtgccaccacgcccagttaattttgtatttttagtagagacggggtttcaccatgttggtcccgctgatctcgaattcccaacctcatgtgacccacccgccttggcctcccgaagtgctgggattacaggtgtgagccaccgtgcccggccccattaggatcttaataagcccgaaggccatcccctgtccttccacagagtctccatctgacagatgagctgcccgagggtcctggattcaccctggacgtggggaagtgtctctcaccaagtccctgttccttgctctgtctcctgacagctcctgggctcctgccacaggtcctttgcacgtgctgtccccatgacccagcatgccagtgcctggcattcagcacctcccttcactcctttcagtctctgctcatctgctcatctgtcacccccagaccaactaacacctaacacctgcagccacaatttttttttggagacacagcctcactctgttgcccaggctggaatgcctcggctcacagccacctctgcctcccgggttcaagcgattctcccacctcagcctcttgagtagcttggactacaggcactcatcaccatgcccagctaatttttttatttttagcagacacagggtttcaccatgttggccaggctgttctcaaactcctgacctcaggtgatccacccacctcggcctcccaaagtgctgggattacaggcatgagccactgcacctggccttttctccataattcttatcaccttcaaatgaactgttccttccttcctttttggttctatcatctgattctgccctctagagagccttgaattatagaactttctagaactatgggaatgttctaaacctgtactgtccaacatgggagccaccagccacttgtggccactgagcccttgaactgtggcttgtgtggctgaggaatggaataggggctttttaaaattattttttaaactaaccagacgtggtggctcacacctgtaatcccagcactttgggaggccgaggcaggtggatcacttgaggtcaggagttcgagtccagcctggccaacatggtgaaaccccatctctactaaaaatataataattagccggtgtgatgtcatacccctgtaatcccagctacttgggaggctgaggcgaggcgggaggattgcttgaacctgggagccggaggttgcagtaagccaatgtcatggcactgcactccagcctgggcgacagagcgagactctgtctcaaaaaaataagtaagtaaataaataagataaagtaattttaaaaatgtatttatgtacgtgtttgtttatttttgagacggagtctcgctctgtcgcccaggctggagtgcagtggcatgatctcggctcactgcaacctccgcctcccgggttcatgccattctcctgtctcagcctcctgagtagctgggactacaggcgcccaccaccacgcccagctaatttttgtatttttagtagagacacggtttcactgtgttagccaggatggtctcgatctcctgacctcatgatccgctcgcctcggcctcgcaaagtggtgggattacaggcgtgagccaccgcactcagcctaaaaatttatttattagagacagggtctccctacgttgcctaggttgaactcaaacttctgggttcaagcaatcctcctgactcagccttctaagtagctgggggactacaggcatgagctactgctcctggagttttatttaagtctaattaaagttgaaagggccacctctttgttgctctatatttgtggggcgtggctaccctattatcgcagctagagcagctagtcccgtaggaatagtatatgagcagtgtatttcattttaaagtttctattggccacatttaacaagaaagagaaaagaacaggtaatattaattttaataatgcattctaattaattcagtatatccaaaatattgtcatttcaatatggagtcgagataacaaggccaggcgtggtggcgcacacctgtaatccccacacttcggggagctgaggtgggaggatcacttgagcccaggaggtccaggctgcagtgagcaatggtcacgccactgcactccagcctgggtgacagagtgagaccttgtctcaaaaaaaaaagagagagagaaataaaagggtggataagatattttcactcgtttgtatgtgaaggctttgaagccgggtgggttttatgcacacagcatggtgaggtttggacagactccatctgaaaggctcactgacggctgtggttggctctagaacatcagggtgtgtcagctgcgttcacagccatgcccccattgcttgggcgtggcaggtgctcaggaactcctgggtgtgtgacctggctggtcaagggcagcgtctgaagagctgggtgggtgagtggggtggggtggctatggctctctgggcctgtttcaccccatcccagcggaatctccctcaggaatctccgggcccacatcccctcctcagccttcctgcctctggtctgtcccctcgtcggacccctgagcactctgaccttggaaccctgagcactccgacctgatgtgatcccctccacggcctcctctgtgccccgccgcaacatcagcctccgcactctgtgtgggctgtgcctcggccccctgccacccgatcctgtccttaccggaaggcgtaggaggagacgatgaggatgagagtgaccacgtggtggagcagcatgaccaccgagtccttgcgccaggtgtccatgtatagcgtagcgtagatggagtggccatagaagcttccctggagcaggtaggcggctgcaatgtcccgtggcactgccatgcccggcgtccagtctggggagagccaaatctcacagtcagggccctgcgaagcctctagacgatcgcctccatgacccggtgacaccctccaagccacacgtgtcctcccagtacccaggtaaccatgcgtgtctgactgctggctttccattcccaattctatttttttttttttttctttgagacggagtctccctctgtcgcccaggctggagtgcagtggcatgatctcagctccacatcctgggttcaaacgattctcctgcttcagcctcctgagtagctaggactacaggtgcatgccaccaagcccggctaattttttgtatttttagtagagacggggtttcactgtgttacccaggatggtctcgatctcctgacctcatgattcacctgcctcggcctcccaaagttctgggattacaggcgtgagccaccccgcccagccgtctttttttttttttttttttttttgagacagagtctcgttctgtcaccagactggagtgcagcggcacgatctcagctcactgcaacctccacctcccaggttcaagcaattctcctgcctcagcctccagagtagctgggattacaggcgctggacaccatgcccggctaatttttttgtatttttagtagagatgggcttttgccatgttggacagactggacttgaactcctgatctcaggtgatccacctgcctcggcctcccaaagtgctgggattacaggcgtgagccaccgtgcccggccagcagggatttttattttaggaagagttttgggtttctaggaaaattgagcagataggacagaaagttcctttctttcttctgccccaacatacccacagatttccatttccctggctttaagtggtatatttgctacaaatgctgaactaatatagacacattattatcattatatacatttaaaatgttttatatatagttttagagttggcttgttctgtggcccatgctggagtgcagtggtgtgatcatagttcactgcagcctcgacctcctgggctcaagtgatcctcccacctcagcctcctgagtagctgggaccacaggcacccataaccatgcctagataatttatttcttttttaatttttgtgttgccatgttgcccagggtgatctcgaactcctgggctcaagcaatcctcctgccttggcctcccaaagtgctggggttacagggatgagccacctcacccagcccagcgccccttctcgttttttttttttttttttttttttttgagatggagtcttgctctgtagcccaggctggagtgcagtggcgggatctcggctcactgcaacctccatatccggggttcaagtgattctcctgcctcagcatgccaagtagctgggattacaggcacccaccaccatgcctggctaatttttttttttttcagtagagacagggtgtcatcatgttggccaggctggtcttgaactcctgaccttgtgatccgcccgcctcggcctcccaaagtgctgggattacgggcgtgagccgctgcgcccggcctcttcctgtctttaacagagccctgccttgcgggtgtcctgggcccactccctgcaaatccctggccctgacagatgcggctgcccacggagtcttgccatgcccgggcacaccatgccaccaagcgcagggtctcccgccaagcgggtcctgcctcaccttcccctcctcctgcctcctggtgcacctgaccaccacgctcaggtgatgggtgacacaccagcccaccccaccacgtccacctcctcctctcctcagccacatccccagaggctgccagacaccaaattcaagggctatgctctggacgggcacggtggctcatgcctgtaatcccagcattttgagaggccgaggcaggagagttgcttgagtccaggagttcgagaccagcctggacaacatggtgagacgctgtctctgcaaaaaaatatataaaaattagctggggccgggcgcagtggctcacgcctgtaatcccagcactttgggaggccgaggcgggcggatcacaaggtcaggagatcaagaccatcctggttaacacagtgaaaccccgtctctactaaaaatacaaaaaattagccgggtgtggtggtgggcgcctgtggtcccagctactcgggaggctgaggtgggaggatcacttgagtcctgaagggaggcagaggtggtggcaggaactaagatgttgccactgcactccagcctgggagacacagccagaccctgtctcaaaacaaaacaaacaaacaaacaaacaacaaaaaaaggcgggaagccatgctgtgctctgcccacaccaacctggaactctctgggttgctccctgttctctggccactccctttctgcagacccccaagacagaccctccagcctccatctgcggcttcctggcccctgccttggtgacctgccctgcagcccagctgcctccagatgccccatgaaccgcctctgcgacaactttcatctcggcctggccccttctgcagccgagttacactaggacccccatccagggtcccctctttggcccatgccacccccaccccagtccaggcactgttgtctcctgcccacatctctccagcgatccctggcccccatgactgtttgtccactctcctcactcagccctgaaggccatgtacacacaaacggtcaccatgacccagcaagtccactagggtgtgtgcctgacaatggaaaacggggactcaaagagatactcatgtgtccctgtctacagcagcacacaaccaaaaggcagacacaacccgaatgtgcatcagtggatggatgaagaatagataggttacctccacacagtggaatactatgcagccatgaaaaagaatgaagcacggatccatgctacaatgtgggtgaaccccaaaaacatgatgctgagtaagagaagccaaacacaaaaggtcacacagtgtgagactccagtgatctgaaatgcccagaacaggcaaatctacagagataggaagtagattggtggctgccaggggctgggggagaggactggtgagtgactgctaatgggacggggtttccttttgtgggggatgataatgttccagacctagacagagggggtggttgaacaacactgtgaatggactaaaagctgatgaactgttcgctttaaaatggttaatttttggccaggaggtggaggcaggtggatcacctgaggtcaggagttggagaccagcctggccaacatggcgaaaccctgtctgtactaaaaatacaaaaattagctgggcatggtggcgcatgcctgtaatcccacctactcgaaggctgaggcaggagcatcacttaaacccgggaggcggaggttgtggtgagccgagatcacaccactgcactccagcctgggcagcaagagtgaaactccatctcaaaaaaaaaaaaaaaaaattgtgttaagatttatatggcaaaaacttaccatctaagccatttgttaagtacacattattgtgcaaccatcaccagcagccatctccagaacattctccttcttccccaatggaacagtcctctgtccccattaaacagtctctccccattcccctcccccagccctggcaccccccatcccactttctgtctctatgagtgggatgactgtaggaacctcatataagtggaatcacatagtatttgtctttttgtgattggctaaaatgcctaatttcaagctacatacattttacctcaataagaaatggaggccaactgaggtggctcacgcctgtaatcccaccactttgggaggccaaggtgggtggatcacttgaggtcagaagttcaagaccagcctggccaacatggtgaaaccccagctctactaaaatactaaaattagccagacatggtgatacacacctgtagtcccagctattcgggaggctgaggcaggagaatcgcttgaacctgggaggcagaggttgcagtgagctgagatggtgccaccgcactccagcctgggtgacagagcgagactccatctcaaaaaaaaaattagctgggtgtggtggctcgtgcctgtaatcccagccactcatgaggctgaggcaggagaatcccttgaacccaggaggcaaaggttccagtgagctgagatcacaccaccacactccagcctgggcgacagagtgagaccctgtctcttaaaaaaaaaaaaaaaaaaaaaaaaaaacaggctaggtgcggtggctcatgcctgtaatcccagcactttgggaggccaagggaggcagatcacctgaagtcgggagttcaagaccagcctgaccaacatggtgaaaccctgtctctactaaaaatacaaaattagccgggtgtggtagtacatgcctgtgatcccagctactccggaggctgaggcaggagaattgcttgaacccaggaggcagaggctgtggtgagccaagatcgtggcattgtactccagcctgggcaacaagagcgaaactctgtctcaaaaaaacaaacaacaaacaaacaaaaaaccctcccctattccagaatttctttctttcttttttttttttttttttttgagacagagtcttgctctgtcgcctaggctggagtgcagtagcatgatctcgactcactgcaacctctacctcccaggttcaagcgattctcttgcctcagcctgccgagtaactgggattacaggcatgcatccccacgcctggctaatttttgtatttttagtagagacagggtttcaccatgttggccaggctggtctggaactcccggcctcaagtgatccgcccacctcagcctcccaaaatgctaggattacaggtgtgagccactgcacccggcccacttcagccctcttccagaatttcaatgaaaattgtctgaaactctgaaatgccctgatcctctccatcctgactctccagaaacatgtgagcccgagcttttgcccagggccaccctgctggatctgttgcccacctttccaacagaggccccccaaccgtcctgtagctccttccccacaggataggggggaagtcctggcttagttcagaggtctcaaatctcctctccctcgttttttgagaaagggcctcactctgtcaacctggctggaatgtagtggtgcaatcttggctcactgcagcctcgacctcccgggctcaagcctcagcctcagcctcctgccccagcctccccaggagctgggaccacaggcacgcgccaccatatccagctaattttatttttttattttttgtagagatggcgtctcactatattcccaaggttggtctcgaactcctgggctcaagtgatcctcccaccttggcctcccaaagtactgggattccaggagtgagtcaccgcacctggcctgtcccacctcttcatactcatatcccacctgctgttgggacactcaatgccacccctgccttgtctccatccctgaatccagaatcttggtctccctgaccagcccccatctcacaagaccctagcatcatcctcaccctcttcctttcacaccacctctagggtggcagcaaatactatcagctctgccttctaaacatttctaaaattggccactttgctcccatcccctcccctcagctcaatcctggtgggagtcccttcaggctccagctcctgctgtcagccccctcctggacccctggggtagatgcccaacccagggtgacatccctcctctgctcccagcccacagataagtaacaaatcctgaccgtggcctccgaggcctggatggcatggcccccacttgcctggacagcagtccctgcctctcctgcctgctccaggcacctccaggccctcactcagtccccttaagtggggccacccctgtccctgctaaaaactgcccctccccacctccccaacacagcacactgcctcttctctccacacaagttttctcatccacacttattgctgttgatagactgcgtactgcaccgtctgttgcccctgccacacggccagcttcatgagggcacagggctttctctgacccgttactagctgtgtctcagctgtggcatacagtagtcgctcaataaatagacatggaaataatcagctaacttgtgagtgtcatttacaaaaagcaactaaggctggacgaggtggctcatgcctgtaatcccaccactttgggaggctgaggtgggaggactgcttgaggccaggagttcaagaccagcctggccaacatagtgagaccccatctctaccaaaaaacacaaaaaaattcgctgggggtggtggcacacacctgtggtcccagctactcagaaggctgaggtgggatgattgcttgagcccaggaggtccaggctgcagtgagctgtgatcgtgccactgtactccagcctgagcaacagagtaagaccgcgtctggggaaaaaaaaaaaaaaaaaaaagcagctaaaggcaagtccatgcccaaaatgttaagagaggctgggcgtggtggctcatgcctgtaatcctgacactttgggaggctgaggcgggcggatcacctgaggtcaggagtttgagaccagcctggccaacatggtgaaacctcgtctctactaaaaatacaaaaattagccgagggtggtggcgcgtgcctataattccagctacttaggaggctgaggcaggagaatcgcttgaacctgggaggtggagattgcagtgagccgagatcgtgccattgcactccagactgggtgacagagtgagactgtctcaaaaaaaaaaaaaaaagttatgagagttcgatcatgggtcatccgtctagaaggaaaactgagcaacagctaacacctcccctctaggggatcaaggtgtgttacatgggaaaactggccccatgggtggcacatccactgtacactctgggctccgtgccaccaggagccctctaggctgttcccatcacatggcaggaaacagctatcatgtgtgtccctggcccacagccctggtggtcctcgcagggcagagaagccgcagcccccactgccccatcgcagatggggtttcctacatcagcctgcccagtggcgatgccggccctgccctgcattctctgccaggacaggtcacacagagcgcgctgcagtcacctccctgcccagcccacccggagctcaggccacatccactccaatcaattggacacagccacttcttatcatcttcccctccacacccccaacccccaggcagggtctcgctctgttgcccaggctggagtgcagtggcatgacctcagctcactgcaacctccacctaccgggttcaagcaattctcccacctcagcctcccaagtagctggtactacagacgtgccccaccataccaggctaattttttgtagagatggaggtcttaccatgttgccccagctgctcttgaactcctgtgctcaagtaatcctcccacctccgcctcccaaagtgttaggattacaggtgtgagccagtgagccaccacgcccagcccacttctcattctcatctttttttttttttttggaaatgaagtcttgctctgtcacccaggctggagtgcagtggcaccatctcggctcactgcaacctccgcctcccgggttcaagtgattctcctgactcagcctcccaagtagctgagattacaggcacgcgccaccatgcctggctaatttatttttgtatttttagtacagacagggtttcaccatgttggccgtgctagtcttgaactcctgacctcaagtgatccacctgcctcagcctcccaaagtgctgggataacaggcgtgagccatcgcaccaggcttcatcatgtttatctcctcaccaagatggtgcaagccgaggggaccctcccacctccatagggcagccagaggaagcattttgtcatccacaaaacccaatcctctccatgctgtgcttaaaaacatcacattcaggctaggtgcagtggctcacacctgtaatcccagcactttgggaggctgaggcgggcagatcatgagatcaggagattgagaccatcctggctaacacggtgaaaccccgtctctactaaaaatacaaaaaattagccgggcgtggtggcgggcgcctgtggtcccagctactcaggaggctgaggcaggagaatggcgtgaacccaggaggcggagctcacagtgagccgagatcgcgccactgcactctagcctgggcgacagagcgagactccatctcaaaaaaagaaaaacaaccacatccagaacagaactcaagctgctgcctcagctctctgcagccaccctcctcctgtccccatgaaacgtgagtgcctccgggcctttgcacgtgctgttaccgacacctggaatgcctgcctggacccacacaggggtccttccaggatgtcttccctgagctccaacacggccagataccccctttcctgtccccagggatcacctttgtcttggggctggcttaacttctgagacacccataggagctctgattctgataagcatccccttacactgttctttttttcttttcttttttaatacagagtctcgctctgttgcccaggctggagtgcagtggcgcgaactcggctcactgcaacctctgcctcccaggttcaagcgattctcctgcctcagcctcccgagtagctgggattacaggcgcccaccacacccggctaattttttgtatttttagtagagacggggtttcaccatgttagccaggatggtctcgatctcctaacctcgtgatccactcaccttggcctcccaaagtgctgggattacaggcgtgagccactgcgcctggccctctttttcttttttgatacaagacagggtctcactctgtcgtccaggctggagtgcagtggcgtgctcatagctccccttggcctccaactcctgggctccagtgatcctcctgcttctgcctcatgagtagctgggaccacaagcctggcgtctttgtgttttaagcagagccctcccggccatcccctcagggcccctaccgtagaagacagatggtgggtcatggaagaaggggtagtcggtgccaaacagcaggtaggcactgtagctccagctgcccaggtagaagagaaacttccaagcgctctcgggcatcttggcggcatctctgggctggaggcagcaccgcttcgccaggggctatgggggagaagacaggcgggcagccattggtgctgggggccagagactgctcctttggggtggggaaactgaggcccagggactccccaggccgggcagcactgggaaggcctgtcccccatgcccacagccacctggagcataaacagagcccacaggcgcctgccaaggctaaacttagtgcccagctgtccggccgccgcggtgctgggaggggagtgaggggggaggccccgaggggagcaggagggctctgggggccagaagggggacacttgggcttacgatgagggagacggatggatgcgtcagcccaagggagttgggctggtgggggtgacccttgaagggaacatggagggggttatatgggggcatcttgggaaacacagagagccccatgggaccgacacagaggggagaggaagaacttgtgaggaagccgccccctcagtgggagattctggagaggctagagggctgggagagactagggggaaggtgtggcggggacatgggaacctgggggcgatgaaaggggaggaggggctggaggcagaaaaaggggacaggaggcggaaaaggtgtcacaggcgaggtgagaccctgaggggacattgggagtgcagaggaagctgctggctccaaggcaggggttggggagtgcggtgggtgggtgggtggcggggcgcggctccagagctgcccggccaagccccacccctggacaagtcccacccccttcccagaggctgagggggccggagcccagagcacccagcagttgtcatggagacagctggagccggctccggtaacccctggcaaccaggctgctgccaagaagatcagctttggaacacccggcagcccctccacccatttctgaggaagggcgagcctcgaaatggggcgagcaccccacccaaggggctggggagggcccccggggctcggccctggtagtctaccagccgccacatcctcctgtcccgcaggggtgggggacggcttgccctcctgggtctcgggcttcccagctggaaactgggaagaaggcaggggcaacaagcaggataaagaccactgcggacccagggaggggccctggacagccctgtctccccctcccacagtaggggtgtggctggggtctctccctcatgtgggtgatatggggacgggagtggggagagtggcagtcagacaacatcccatcatcgacctcacaagggccagcctcttcccggccagcagagaaaggcccctttgttggcgctgggcacattgtccctgcaccctccagccagacgggcggggtgacaccagctggtccacgggggtgtccaggccaagctaaaggcccaaacaccttccaaccagctcctgccacagcgacccctccccagggaagtgagtggggtcaggcgccaatgtcaccatcatggtcactctctcgcaggggcgatggtctccgcagaaactggggaattctgctgtcgcctcttggaggcagcacagtccaaccctgaagccccgggccatgtcacctccaagggagcgaccactggcgtggccagagcacccaggcccttgccatccctggtcggagggtggcgctgaccccagataggcacaaggcagcgaccgggcagctcctgcctcttcccgattacagcgggcaagccggccccgccgccgcacggacccagcagaaaacgggcagcggacctcgctccgggccggggcgcagcccgcatggcagggaggcgcatggcgcaggccgcggtgcgccgagccctcccgttcccggtcctgggcttctcagtgtctggctcggccctgccggaaagagcgcgcggtggccggagccatccaccgcgcggggccccctggtcccaaactgaccggaaagggccgtgcctcggtcccccacgtctcaaacatcccacctgtctcgggccccccatgtcccagactcaccccagcccggccacacccccgcatctacccggttcccccacgcagcactgtctgaagggggcgcgcggcggcccgagagaccttatcctggggctccaacgtcctgggcctctccagcccgaggcccccacccacgttccggcgaccccttcatccgcagcagccagcgctggaagaaaggaacgcgccggcggccccaggtccccggtcccggcttcccccagtccggggtcccctcgtcccggcccccggccacactgacccgaaagaggcgcgcagtggccgcggagcgcagggcggtccagcccagcgcgccgagcgccagcagcagcagctcgggcggcgccaggtgcgcgtgctcagccaggccgcgacgcgccagcccccagccgcagtccgtgcagccccgcgccgccgccagcgcgctgccccagccgcgctgcactagctgcgcgtagctcggcatgggctcgggccccgtcggccccgccgcgggccccgccgccgccataccgcccgctcgcccgccgtgcccgtcgcctgcgcccgcccgcggtagccgacggagccgcgcgccccgcgtcacgcgccgcagctgggccgggggcgcgcgggcgggagagcggagggcggaggggcgggaccggcgcaagctccgccccgctgggggcgcggctggggggcggccagcggggacgcggggcgccctggaggcgggcccgcgcccctgcccgtttcccagcagagaaacccaggcgcgggggccggagctgggggcccgttggacctggaccccgagagaccccgcgcaccgccgtgtcgcgcccccatgcctgccccgcgcgccccccgctcccccaccccaccgcgccgtgcccgtgacggggggcacgggggacactagcaggcagtcccctcgactggcgacccccgcttctcccggccctccagcacgccacgccgctcccgctccatcgccccggcccgctccgacctcaccgttcttggagccctcgctccttctcaaggacccgaggcctggcacgccttggcacagtcttgggaccatcccgtggccctcccgcattcaggaggcgtaggctcaatgaaacattctcattcttcaaaaggacacggcccacgccagggcgttgggaggcgcacctagtggagacgcagctctctgccctacaccaggagcttggcaatggggttccagcttggacgcgggtaccctgggcacttcccaggcatcttcttctgcaggtctgcacagcgggctactgggacaaaggtgtgatgggggctgctgagattagggggttctctgagggtcacttgctgctgtgaccctggggaacccggggggggggctccccaacatcaggttaatacatgagttgcagagaggctgcaggagtgggtgccaacgtgggagggactcccaatctggatcgactgtgacatcattgggaccaccataagtgactttccaatgcactgttcattgacaaggccctgtgcccaaagccactgaaggccatcgaggaagacactggtcacctctgttaggaccgccatctccccaggcactgctgcaccccccctccatcctagcccgcaggatgtccccacacctggccttcaaggtgcaggatgcagggatgagtcctgcagcagccgcgctggctcccgaacacctgcacctgaacttcaggggcacaggtgaacacaccttccccttgccccacaccgagtcccccacaacacatccaggtggccctgcatctggccacttctctgcatctgcacagccttgccccccgctccccgccaccaccaccactaccaccactaccctcttccgtctggtatcctggcttcctcctcaccccacagaggtgagaaggtggctgcgacgctgttggcctgttcctcgtctgcttgcagccctctatggctcctgttccactcagggaaagcccaagtcctcactggctgccctcacagcgccctgtttccctccgcctgtgggcttttctgctgttcttccaacatgccaagctctgtcctgcctcagggcctttgcactagctgttcccccctcctgaaatgctgttcccctaggtacctgcatggctcttctgccacctgctcaggctgcccccgactctgaagtcacacgcccctcatgtcttcatgtctgcttggcacttgtcaccatctgcccctacatacatacagctcatttttttttttgagttggagtcttgctccgttgcccagactggagtgcagtggcgcaatctcagctgaccgcaacctccgcctcccaggttcaagggattctcctgcctcagtctcccgagtagctgggattacaggcgcctgctatcacacccagctaatctttgtattttctgtagagacagggttttgccatattggccgggctggtctcgaactcctgacctcaagtgatctgcctgtcttggcctcccaaagtgctgggattacaggcatgagccaccgtgcctggccccactctttattcttgaacgtggactccatgtggactaggggcctagtgtaggggtggggcacgaggcttggcctggccaatagttcaggtccagccggaggccagagatgtgactaacgccacaacctgcctggcaggcagagggggacgagggggatatgctctcaaaggtccagccaggcctgtggggcagccgtggacagtcccagccacctccctccaccctctcggccagcactatctggtcaccatggcgcccatcggtcacgggagaggcgccacccacccacccactagccccagctcagcctcgaatttctttttggcgggtccagccaggaggctgccaacgggtgggtgcagggcaggaatggaaggcggctctactggcagctggggaccaggcacccaaggctgggcggaggtcagtcttgaggccagtgtccccccacccaccccaaggtctcctccctccagaaagctcggcctggacccctcctaatgtccctgtccagggagtcctcttttgccacttccctcccctaccaggctgggggtgggggtcgcttgctgtcctgccctggcaaccagagacggggtctggtttcaaatgaataggcctgggtgtggcttggggaaacccagtcttatcttttccctgggagataagcccaggccaggctcagaggtcaaagggcatgcatccccatccagcgccccttgacctcacagccctgtgccaccgagggacctctgcaccggtcatgcccactgccagggtgcctgtccccctagaacctagcctggcagctcctttttgttgttcgggtgggcacagctcaatggtgacatctgggaggctccggccagccctgctgccacccacccacctccctccctaaatggtgcggccgcctctcatcgcggctgggtgcttggccccaggaccctgccacagcaggactctgccttggaggagggtttgcggggcggcaggagcagcacctggggttaacgctgaccctgcagggcccctccggctttgctgagctgaggcctgagtttttcctgccctggcccccacttcctccaggccactaggggttctcattttgaatcttggtgcccctcatgatagcggcatgacttctctgtgcctcagtttcccccgatgccaaccagggctgctcagtggcctctaggggccagggtgaagcatggggacagggctgtgctgcctctggcctgcaggagcaggttgtggctgtgtgaggggcggggtgggggtctgcacacctgctgctcgtcacagaccctggtctccaggaacagccctggatgccagtgccccaggactctccctgagcgtcagctcccacacgcccccagcaaagtgaccagagcacatcatcaggtggaacaccctggagttgagatatttattaacagatgggggtgctgggggtgggctcctgcccccagaggggatgcaggtggatgccgggtggggagggctgcagggctggctcctggcctctgtcctggcttcatggtcctgacagctctgggccagcctcaggcgctgggagcgtactgtagcaccagcctgtcaaagtcgttctcctttagcaagacacatggcaacacagggtgggggcagggtgtggggagacaggtggagggagagagagagggcgcatgtgagcccaggctgagctccaggcgccccctggcctggttctcggggacaggccatccccaccactcaccttggcctggtactccttgatgaagggatgggacctgtgggcatccttcagctgggacaggtatcggtttgtcacctgcaggggaggcagggaggcaggtgagccgaacacggggaccccacggtggctctgacctgctggacaggggtggattggggtgagagccacagtaccccagggggctcctcaccctgccttgggactgggctgatctcggagaaccttcagggtgggggtggagggatgggcctgccccctggagaggcgctggcatggagctggcctccgtacatggtgggggatgtattgtggtgttcaggggagcaggtcgggcagggccccaggtgaggatgggttggggggcacagggtttgtgagggaggtgggctgcggtaggcatactgtatacagagttttcccaggggcctagggattagggcctggaccccaggctggggtcccagggtctggacattagggttggcctggagccctgggggccgcttacctcagggggcttgcccaggtgctgggacaggacgatgaggttgaccagcgtctctgggtagccactatcctggagacacaggcagacacggggaggcagggtcagccactccagcccccatgcctgcccgtcacccccacctcaggcagcaccacacaaggtcacctcctcagaggtggggtgggactgacaccgcccaccgctctgcaaggtggagatctcagatgatacggtgccaaggggccagccgcctcgctgagcctcagtttccccatctgtagtccagcctggggtacgaccccttgtttacagagacttgggaaggttgtatttgtcccacacatctcaaagccatggggcccagacccagatggcctcaactcctgctgtacaacgaaccccgaggccatgggcagacctgccacccctgcaccagctcccaaggagccttgaaggagacctcggcaggggaccttgcctgactcactcactctaggctcccagcacacaggaccctaggaaacatctaggccaggagacccagccagagccctggtgtctgcttggagcacagacacaccaacgaggatgcgcccagagcccgacctgcccacggcggcccatggcagggcacctttttgcagaccggacttttctgagcctcagtctccaccatgaagggggacaccagcttgcgctcacaggagcagccatgaggtggctccaaagggaagtggggggacctgagtgcctcccaaaacccagcaagaatgcagggtgaccacagccacggggaggccaccagggccaaggggcacggccagccagccccaggtggtgtttcaagagacaaggacagaagggagtcatctaactggtgagtcacggaacgtgtcacctgagaggtgtaacaaaagcccccagaggatgcggccatgaacacaacatgcatccaagtgttctcaggtggcagggaggggcagggtggtggaggagggcgccagtcttgcccctggggcagcgagggacacacagcctgtctgagattgcacatcaggctgggagttcctgactagccctgactgctcagagctaaagatggaccctgctcaggaggagcagtacccggcctgtgatggggccagcctgataccccttggccagccccgctctgcaaacaactttctgatgataactcagcccctggaaagtcagacagggaggagggcttcaccagtgtttgtcactagattaaaactgtttctcagctgggcgcactggcgcatgtctatcatcccagcactttagaaggccaaggagggtgagaattgtttgagcccaggagttcaagactaacctggacaacacagtgagaccccatttctaacaaaaaatacaaaaattagccacgcatggtggcataccgtttcaaaaaacaaacaaaaaaccccccaaaattcgtttctccaaaatggaaaaagctttgatgtcctttctgattataaaaataataatccaggctgggcacagtggctcacgcctgtaatccagtactttgggagtccaaggtgggcagcatcatgaggtcaggagattgagaccatcctggctaacacagcaaaaccccatctctactaaaaatacaaaaaattagctgggcatggtggtgggcgcctgtagtcccagctactcgggaggctgaggcaggagaatggcatgaacccaggaggcagagcttgcagtgagccgagatcacaccactgcactccagcctgggcgacagagcaagactccatctcaaaaaaaaaaaaaaaaaaaatccaccaagcatggtggctcacacctataatcctaatgctttgggaggctgaggtgggacgatcacttgaggccaggagttcgagaccaacctgggcaacacagcaagaacaaccccgtctttacaaaatatatatatatttttaatttaacataacataaactcttcataaagactgcagatggccaggcgtggtggctcacgcctataatcccagcactttgggaggctgaggcgggtggatcacctgaggtcaggagtttgagaccagcctgaccaacatggcaaaaccccgtctctactaaaaatacaaaaattagccaggcgtggtggcagccgcctgtaatcccagctacttgggaggctgaggcaaaagaatcacttgaacccaggaggcggaggttgcattgagctgagatcacaccactgcactgcagcctgggtgacagagtgagactccatctcaaaaaaaaaaaaaaagaagaaaggaaaggaaggaaaggaaggaaaggaaggaaaggaaaggaaggaaaggaaggaaaggaaggaaaggaaggaaggaaggaagggaaagaaggaaggaaggaaggaaggaaggaaggaaggaaggaaggaaggaaggaaggaagaaaagactgcagacatcaggcaggagatgactgcagccaccctgggcaggcagcgctctctcaacgaagagctcctgtccacagcacactctcccctacataagtacggggagtgtctctccaatactgagtatgtactcaggtgaggggtcccacttgcaggtcccgggccaggcagctgaggtgacaacaaggacggctcagaccactgaggcccaggctgcccagatgccccatttctgtgaggccggaatctggatttctttgcaggtgagatccctgctttgtggatctcgctgctgactgggccttagaagccctgtggggccacacgcacacccagggggtctctgctacacttgtttctgtccgccctgaccccaccctctggccgcctggccttccctccgtccccactctgggacaggcttgtgcctaccttgtctagcgcctcctgcagcaggccctcagcggcctcccagcggccctgggccatgtggcaggccgcctgcccattgagcagcagcagggtgggcgagcacttgtcagccatctcctggaagatgtagtaggcatcctgcagcttctcaccaccctgcagggagggtcccgcatcattgcctgtgcccctgctgcccggcccttcccccgccagccccctcccctagcgggggggactccagcactgcacagagacgaatctggtgtgcccggttcaaggcacagccactccgccatggggactacccgtaacttgtactctgctgatggggcctaaagactcgtggccgcctcctgccccacctcccacccagctcccggagtgctgagtacacagaggtggaatctggggcttccaaggcctcagtgcacaggtggctggctcagggtctgagtggggaccactgggtcactgagcacgtcagaggaggaggagtcagctctgtgaccagcagccctgacctgtccacttgctcagaacagcagaacacttgcagggggagcctgaggccaaggcaggcagtgaaaacagcccaaactacccgataggtctgccggggcctgtcctaccatactagacggtcactggaagtctgtctgggtgaggcttcagccccgtggcgggcagggacggggagcacatttttttttctttctcagagtttcactcttgttgctcaggcaggagtgcactggcgcgatcttggctcaccgcaacctccacctcccgggttcaagcgattctcctgcctcagcctcctgagtagctgggtttacaggtgcatggcaccaagcccagctaattttgtatttttggtaaagatggggtttctccatgttggtcaggctggtctagaactcccaacctcacatgatccacccgcctcggcctcccgaagtgctgggattacaggcgtgagccactgcgaccagccaggaagcacattttaataggcccacacaaaagagtggctcagaagggggccaagtcccagaaaccaggagaggggctgttgccgggcggaggtgcccaggcctgggagctgaggacatctccaccgctgctatgggaacactgaactccgtccctggctggcgaccaggaccctggagagcaaagctgagtcgcagaaaaccccaggaagccctgaggggaggagggcctgccaggccaacccagaccctcgagtacccctgtgcctcaggctcaggaacccgtccccgcccccaccatctcttcgctctggctctggccaagtcgcttggctgtgagaagcccggaatggagtcaaggctgagttatgccaggctggcaggggccacggcctgatcctggagccccactggagtggccagcagcctacgcacaggtgggggtgcccacagaccctgctcagccaggtgcccgcaatgcccacccacctcatggcctagggctcaccgtggccaggctgacccaggcagtggcgagctgggtgagggtggcatcctcgtccaggtcctgcattctcttcagctccttcctggggcggggacagatgacagaggggctgagtggccgagggccctggcctggccatccctgccttgtccccacttggggcccaccggagcctggggatggcccctgctttgtgctccactgcatgctcataccccacgactaagtgcccgagccaccctgcccgtctgaccacgtgcaggccctgggaaggtgggactggggccagctatggccccccagggtggccaccacaaggtagagctcaggagagactcactccatggaggatggaacgcagggaagggcaacggaactacagtgtgaacaactctgaggcaagggctttggaaacggcagcaggggagtcctggacccccagccatggcctccgacctggtgatgccacgtgcaggccccgccagccccacggcacagttacaagctggtcaagtaacatgttgctccaggcacaacctccactctccctccatgaagcccaccctcaccctgtgggagaggcctgccacccactgcatagagagaaactgaggcacagagagccatggccctcctccctggcaacatactgcagggaagggctgaacgacagcaagccacccccatggaaaggaaagacaacaagagtaatgacagcaccacagacgctctgggctgtgacgctctgggctgtgacgctctgggctgtggctcagtgcgggtggagaggggcaggagggctcaccgggcgaggtccaggcggtccagcttcagcaggatctgcactgtcatggctgtgctgcaggacagggcgagggggcggtcagcgggtcgccacagacacattgcatggccgctccacacccagggctcactgtgtgtgtctgggatgttcctaagtcctgtgcttaggaccaccagccccgcccagcagaggaggacaccctcactcccacatttcaccgctcagcttcctcaggcccaggagctctgggggaggtacccaggatggggtttcaggccccggcccactcaccgcccatctggagaagcagcctccatgggctgtgcttccagatggagggccctgcccggactcgacaccctggaggcatcaacactcaggaacaaggccctagaggagggccacgcacccgcccctgcacctgcacctgcagcagagccctggggccacccactctctgcaggccccctcgtcccctcatccctctcagccccaggtggctgtgaccacgaattactcgtgaggcctcttgttcttgttttcctgccaacaggagccagcacctggaccagcaccgagtcggccggctcgccgacagtgtgacatccctatttattttcttttttgtgtgtgagtcagggtctggctctgccacccaggctggagtgcagtggcaccatcacggctcactgcagcctccacctcccagactcaagggatactcctgcttccgcctcccaagtagctggaaacataggtgcatgtcaccatgcctggctcgccctgcaattctaagccctctgtggatggaggtgggatgggagcagatccacagcgaccatgaaatgcccagcttgcaactcacagtggaaggcaggcactgcagggacagctcacggggaagaactgacacactttctgtgaccagtgccctggacatggcccggagtcacatcctagggtggaggggggcaccaaccttgcagggcttcagcaccccaaccccagagggccctggaggagggccggtatggggggcccggggaggcctgagagactgggcccagggccgagacacagaaggcttcgtggggggtggggacacagaaaccgagcagagacaaagccgctttctgctctgcccttgggaacagagggttgcagcctgggcaccgtgtccttggatctgcagcctggtgcgcagatgggagtgcctcccacactgggcaggggagctggagcctggacagcaggccagggcctcatttcagcaccacctttctctgctcccatgacgacagccagcgaggccgtgcgcagcctggagatgtggcagggggcacttgcctccctgggctggccccagagcagggaggccactcaccactccaggctgtccccctggtgcagcgcacgcagggcggcatccgggttctggtcgtggagatagatggaggcggccatgagcaggaaggtggtgttggtcacgtccacgctcctgctcatctctcggtccagctcggccacgatgctgtccctgcaagacagagatgctcacgacccacagctggggtggcctctgtgggacctcagagggtccccttccttggaagcagacaggtccagagagggtgagccaggccctgggggtgcagagcagcagcaggccgagcatcgagctgtcccgacatgtcctccctccgttcctatgaagcacctctcatgctgggccaggcaaggacccgaggccgggagatgtggggtggggcgctccaaggggacatgaggaggcaccgtcagtctcacaccaacctcacccgccttcctgaggaggctggtgggcccagctgggactcctgaccataacccatcaaccctgtgggcttcaaggccacgtcttctagcaggaggtcggcctgggtgccgaggggccgtgcagaaggatgggagccctggggcacccccactgccagggcagctgccctcagtccctgagagcccagggtgctggctgcaccctgaagatggccagtgtgctgcgggccagggccaggcttgagcccaggcaaggctgaggaccggctcagctccgagggcacaggtcacccatgcctccatgtccctaactggacccagaccctccattccccatggctattgagcagctaaaaagagaaggcaggtgagggggccaccctagaccaaagctggtgttcttctgggttcaaacgtggctctgtgaccccgtaagcatccacgcgcatctgggggctgtctgcccagggcccgtgtctgaggtgtcactgagggcatggcatgtctgataccaaccaggctccactgagggctcgccacagtgccaggtccaacagacaagtgacttcaggtctgagtctgtttccccgtgctgagggaccatgttacagggatcatgcaggggaggagcaaggagctcccaagaccatcttacaaagcttcctgaggctccagcacacaagggtgtataaacactgccagttgtcgtagcgttggtactgtaatgttgtcatcctaaggtgttacaattaccaatggggccgggtactgtggctcacacctgtaaccccagcgctttgggaggccaaggcaggatcgcttaagcccaggagttcaagaccaccctgggcaacatagtaggacccctttttctacaaaaaagtaagaaagtcagctgggcctggtggcgcctgtagtcccaactacttgggaggctgaggcaggaggatggcttcagcccgggaggttgaagctgcggtgagctgtggtcacacctctgcactccagcctgggtgacagagggagaccatctcaaaaacaagcaacagcaacaaaatcaattactgggcggatcgcttgagcccaggagtttgagaccagcctgggcaacatggcaaaaccccatctctctttttttttttttgagacggagtctcgcactttcgcccaggctggagtgcagtggtgcgatcttggctcactgcaagctccgcctcccgggttcatgccattctcccgcctcagcctcccgagtagctgggactacaggcacccgccaccatgcccggctaattttttttgtatttttagtagagatggggtttcacgtgttagccaggatggtctccatctcctgacctcgtgatccgcccgcctcggcctcccaaagtgctgggattacaggtgtgagccactgcgcccggccaggcaaaaccccatctctaaaaaatatacaaattagccaggcatggtgatgcgtgcctgtagtcccagctattcgggaggctgaggtgggatgatcacttgagcctgggagatcaaggctgcagtaagccaagattgtgccactgtatgccaggctgaacgacagagcaagaccgtatctcaagaaaacaaaatcaaaaccaaaaccaattactaatggatgctccttgtccccggggcgtcctgccaatgaggtcgcggctgtgcagccagatgaacggaccacaagcccctgcctggaccgcctgctctccggggctgcttttctgtgatgctcacagcagctgctgctcctgggggacccagggttccctgccttcactccagctggtgaagtaagtgcagggtgggagaaacagtggccctgggaggtcacctgtctcaatgtcctggagctgctgtggcaaagcaccacagcccgggcagttaaggacaacagggattcgttcctcacagctctggaggccgtaagtctgaagtcaaggtggcggcagggctggctccagctggaggctggagggcaaggccgtcccaggcctctctcccagctctggtggctgctggccactcgtggtgctccttggctagcagacatgtcactccagtctgttgtcacatgggcttaactctgtgggcctctttcctttttttttttttttttttaagacagtctcccgctgtcacccaggctggagtgcactagtgcgatcttggctcactgcaacctctgcctgccaggttcaagcgattctcctgcctcagcctcccaagtagctggaatcacagacatcacatcctgttaattctgtatttttaatagaaatggggtttcaccacgttggccaggctggtcttgaaaactcctgacctcaggtgatctgcccacctcgtcctcccaaagtgctgggattacaagtatgagccactgcacccagccctccttttatctcttaaaaggacacaagtccttggctttggggcccaccctaaatccagcatgtcttcatctccttatctcttaatctgatcggcaaagaccctttttccaaatgatatcatattcacaagcatgtgggataggatatggacgtaccttttgggggacaccattcaccccaccatgctgcctctgcacaggagtcagctcccaggaaccccaggtttctttgagtgaagggaggcggtagttgggacactgcctccgtgggccaaggaagagcaggatcacagcagtctccccatgccagaccctcactccgaccccacagcaggagggggcaaggttcctgggtccccacagcccagccccctctccccttggctgccgcccatgggcgtttgaccaacgctggcctgtggctcaggggcaggacaggcgtggcctcacccaccctcccactgggctccaggggagatactggcaggttgcagtccccaactagctgggactagaaaactgataggatttgggaggctgaggtgggcagaccgcctgagctcaggagttcgagaccaccctgggcaacacggtgaaacccagtctctgctaaaatacaaaaattagctggacgtggtggcacgcagctatagtcgtagctactcaggaggctgaggcacaagaatcacttgaacccaggaggcagaggttgcagtgagccgagatctcaccactgcaactccagcctggtgacagagtgagactccatctctaaataaataaataagaaaactgatgggagggccctgcccccgctgcgccctgggctgtcttggggctctgggtgttgcagagggctgctcggtaattgatattttcagttctaggttcagagagtgccttgtggtccatgagggcgtgtgcacacacagcactgtctctgaccctcccctttgaagcaggatccatcaccagccccccactgctgtgcaggtgagggaaactgaggcacaaagcagcaggggagcagaggggagaggcgcctaatctgagggatgctgtgcgctgcacgccatgcccccacccacccaggttcataaccaacaggccttgaagatggccccgcgcctcaggccaacccattctctggggcctcacctccgactctcgtgggcgaggtagtcagcaaacatgcgcacggcctggagctcaggggccgaggagggcttgatctcatccaggaccacaccgaacttcctctgcagtagggacgaggcgtcagctgcacccgtccaccccagaggatttccatgtcttcagcttggcagggagagccccagacaggaagtccctgccccaccagggacccctcagcccagcatgggccacctccactgcagtacactgtggagggtggcatggcgtcacctgtcgtgagcagccaggtgtgccctcatctgcagggccacactgcccatgccttgagctagggaccctggtaggttactgtctatcccctggcagctgtccacctctggtggtgaggtgaagggcgtgtcacctgggggcagggcagcagcagttatgggggttgtgacatgcgcttctataaagcaggacatgcccccagccagccctgcccacctactggccctctgaggatgcccagactgataccactgtcacatctgcagctgggggcccgtccctcattgtgttccctcctagatggttccttccccatttttttttttttcgagacggagtctcgctctgtcgcccaggctggagtgcagtggcgtgatctcggctcactgcaagctccacctcccaggttcacaccattctcctgcctcagcctcccgagtagctgagactacaggcgcccgccaccacgcccggctaatttttttgtatttttagtagagacggggtttcactgtgttagccaggatggtctcaatctcctgaccttgtgatccacccaccttggcctcccaaaatgctgggattacaggtgtgagccaccacgcccggccttttttttttttttttgagatggagtttcgctcttggtgcccaggctggagtgtaatgctgtgacctcagctcaccgaaacctctgcctcccaggttcaagtaattctcctgcctcagcctcccaagtagctgggattacaggcatgcaccaccacacctggctaattctgtatttttagtagagacagggtttctccatgttgaggctggtctcgaactcctgacctcaggtgatctgcccgccttggcctcccaaagtgctgggattacaggcgtgaaccaccgggcccagcccccattcttatttttttagagacaaggtcttgctatgttgtccaggctggagtgcaatggcgtgatcacggctcactgtaatcttgacctcctgggctcaactgatcctcctgccacagcctcccaattagctgggactccaggcacatgccaccatgactgtcttattttttaatttttttttgtagagacgggggtctcactatgttgcccaggctggtcttgaactcctggcttcaagtgatcctcccacctcagcctcccaaagattacaggtgtgagccactgtgcctggctcctaccaattattttaggaaaaaaaaaaaaatcggctgggcgcgttggctcacgcctgtaatctcagcactttgggaggctgaggcaggtggatcatgaagtcaggagttcaagaccaccctggctaatgtggtgaaaccacgtgtttattaaaaatataaaaattagccaggcgtggtggcgcacgcctgtagtcccagctacttgggaggctgagacaggagaatcacttgaacccaggagacggaggttgcagtgagctgagatcgagtacgacagagtgagactccgtctcaaaaaaaaaaaaaaaaaaatcaagaagctgtgacccaggccccctggcctggcagtctcaggcctccgtgacacagccaccttcacatgctggctgcgctggctgttcacagtcactgaacactgcaggcctgggtccctgctttgtttactgtccccgccacccactctgtggtgccttcctgtccccagccccaccctctactctgttcatcactcttgcccccggccaaggcccgcactcacctgcgccaggtacgctctatacaggaagacgtccctctccacgtctctctctgggcttgatagctgtgggaaccaatgtgagtcaggacgcacagtgggaggcccagcgcagcccacacagggtgagcatgacagacaggcccctgtacactggggacaggtggcttctccggcagggttggaggtctgagtcccagccctgatcctccgtagcccgagtggcctctgctgggggtaccctacacggggggtgcctgatctcatcccgcgctgacaccaccccaggaaggaggcttgctcccaagttcagtgtctgccccagtcacacttaagaagccagggtggcacccgcacctctaacctctggacatggggccactgtggcttgattctgttctgcttttgtctcaagacattttgagctcagtttggctgccccagtgtggtgacatctgtgcccagccctggccaggggagaccctgggaatggctctgtacttgggccacacccccacagcccagccattgcacagaactgaggagcaagagggaggtaacctgtggcaacatccattttgggatgataatgaagctgcccctgagcccaggccagggagggaggctgggaccgctctccagaacacagctttgcatgctgcccccggaggctggctgacttcccagggtgcccatggcaggtgggcacagtgcagctcagcccatggcctgagggtgctcgcccaggcccctgggggcttcgagaggaaagtacagttgggaaggggcccagccaccttggcatcgccactccaacaacctctaaacagaggggactgagaaggctgtcagcaagagggcctgccagctgtcaaggcacagggtcaaaggacccagtgcccaaaccagggggagtcactctgccctgtcctctgaagccgagaaccacagattccaagccacatctcttccttctccccagcctgagggaggagcgtggatgtcaaacgtgtcctcatcccaggccgccgcagacctggccccagcctgactcaggctgccattgccaagaggacccagcagcttctgctcaggccctggtagccagagtgggtatctggctatgatttggaacaagatgccatctaaataaataactcctagaagaatgtcaaaggcatgcggagggtggtggctgcagaaatcgagccccacctgcaaatgggatggacaggtgaaatatgtaccttttcaagtatgcaaagaaacatattataggccgggcatggtagctcatgcctgtaatcccagcactttgggaggccgaagtgggtggatcattagaggtcaggagttccagaccagcctggccaacatggtgaaaccccgcctctacttaaaaatacaaaaattagccaggtgtggtggcgggcgcctataatcccagctactcaggaggctgaggcaagagaatcacttgaacccgggagatagaggctgtagtaagccgagatcacgccattgcactccagcctaggtgacagagcaagactccatctcaataaaaaataaataagtaactctcaatcaaccttctgaggtggacttcagttaggtgactagcccagggccacatgccaccctcagttaaaaaagacaggccaggtgtggtggctcacacctgtaaacccagtgctttgggaggccaaagcaggagcactgcttgagcccaggagtttgagaccagcataggcaacatagcaaaaagcatagtcttttttttttttttttttttgatggagtcttgctctgtcacccaggttggagtgcagtggcgtgtatctcggctcactacaacctctgccgcctgggttcaagagatttttctgcctcagtctcccgagtagccgcgactatatgtatttttagtagagatggggtttcaccatattggccaggctggtcttgaactcctgaccttgtgaaccagccgcctcggcctcccaaagtgctgggattacaggcatgagccaccgtgcccggtctgagaccctgtgtccataaaaaaattataaatattagccaggtgtggtagcatgcacctgtagtcccagcgactcaggaggttcatgaaggaggatcgcttgagcctgggaggtcgaggctacagtggactatgatcatgccactgcactgcactctggcctgggtgacagagtgagaccctgtctatctttagggaaaaaaaagagacaaaagctggctgttgggctttcaaagtgaggacacagtggggcgccatcgggggcaccagggtggcctcagccgcccctgtgtgaaatgcaggtgcccaggagactgtgcgtgcggaagtgctcagaggctgcagagtgcactggagagacaagagtgccgggaagcataacaacaacaaatgtgcagaccgtgaccctgacgtgaggctctggaaccgttgtggttttcctcgacttccagggacgatcctaccatcaggacgcatgtgtgtccccggggtgggagagcattgctcttcaaccccaagggctcactacgatcacctgggagcccaggaaccaccaaagccaggaggccacatccaccaaggtcacctggccctaggatggccccagcactggccccaggtggcttaagatgtggccatggttgaggaatcagggtactgtttgggaaggcgggtgacaggatgggggccctgtagccagaaaccttgggggtagtaactcctcccttctgtccctgtagccagtgatctgaccgcactgggccgtcagcaactcaaggcctatgagctgcttcaaccccaacagctgggcggtgcctgccatcttgtgggcaaactggcaaatgtcagaaacccagaaacgtcatgatggtagcctagtgctgggggcagcaaagggcaaagactgccaggtgctctccctggggccacctcaggtggggctgaggttgctcaggccactgtcatgaactaccacagaccagatggcttaaaaaatgtattcctcaaaaattagccaggtgtggtggcgcacgcctgtaatcccacctactcgggaggctgaggcaggagaatcgcttgaacccaggaggcagaggttgtggtgagctgagatcatgccactacactccagcctgggcaacagagcaagactccatctcaaaaacaaaaaaacaaaaattagctgggcgtggtggcaggcacctgtaatcccagctactctgaaggctgaggcaggagaatggtgtgaacccaggaggcggaggatgcagtgagctgagattgtgccactgcactccagcctgggtgacagagttagactctgtctcaaaaaaaaaaagtattcctggccaggcgtggtggctcacacctgtaatcccagcactgtgggaggctgaggcgggcagatcacttgaggtcaagagttcgagatcagcctgaccaacatgataaaaccctgtctctactaaaaatacaaaaattaggccaggaacggtaactcatgcctataatcccagcactttgggaggctgaggcaggcggatcatgaggtcaggagttacagacgagcctggccaacacagtgaaaccccatcactaggaaaaatacaaaaattagctgggtgtggtggcacacgcctgtagtcccagctactagggaggctgaggcaggagaactgcttgaacccgggaggcagaggttgtggtgagctgagatcgtgccactgcactccagcctgggcaacagggcaagactccatctcaaaaacaaaaaaacaaaaaaaaaattagctgggtgtggtggtgggcacctgtaatcctagccacttgggaggctgaggcaggacaatcgcttgaacccaggaggaggaggatgccactgcactccagcctgggtgacacagagtgagatcctgtctcaaaaaaaaaaaaaaaaaaaaaaaaagtattccttcacagtcacagtcctggaggccagaagtcccaaatcaaggtgtcagcagggccacactccttccaaaggctctaggggaggatacttccctgcctctcccagcttttggtgactgttacattcctcagtttgtagccacattactcccatctctgcttccatcatctctgtgtctcaaatctccctctgcctttttttttttctttttccagtggcgggttctggtgaagacaagaaagcctactagaaacattctttttttctttttttttttttttttttgagatagggtctcacttttgacatagtaagagcaccaacatctcagacaaacactgccactttaagttccagccccctttctagcctcatgaattttaaggaaatttcttttttctttttttttaatagagaagtctcgctcttgttccccaggcttgaatgcaatggctggatcttggctcactgcaacctccacctcctgggttcaaacgattctcctgcctctgcctcccaagtagctgggattaaggtgcctgccaccatgcccggctaatttttgtattttttagtagagacggggtttcaccaagttggtcaggctggtctcgaactcctgacctcaggtgatccgcccgcctcccaaagtgctggaattacaggtgtgaaccaccgcgcccggccaggaaatcacttctaactacaagcagccagaaagaggagacagtaaaacacagaaagacagctcggacagagagagagtgggaagaaaatttcttgggtaactgccaaacttcaccttcatacaacgggccccagtaaaacagtgggccttaataagcacattcctttcccttcaggtgcactaaaataggcaagctaaaagcagagtaggggggtatgcctgcagctgcagaaagatgtatgggaggctgggcacggtggctcacacctgtaatcccaacactttggtaggccaaggcgggcagatcacaaggtcaagagatggagaccatcctggccaacatggtgaaaccccgtctctactaaaaatacaaaaattagccgggccatggtggcgcgcgcctgtaatcccagctactcgagaggctgagaaaggagaattgcttgaacctgggggcggaggttgcagtgagccgagatcacgccactgcactccagcctggcaacagcgcgagtctccatctcaaaaaaaaaaaaaaaagaaaagaaaagaaaagaaaaaagaaagatgtatgggaacagacacacaactctccctcccagataagcacaacgaagagacacagaagcagttcaagcctctgataaactctccgaccctgaatccttaaaaactcttagtctgtaaaagagtgttactctgacccaactccgccagaaggcgcctctcaggtttgttttctctaaaataaacctgtcttgactggcaagccacctttcgtgtttctttcctctttaattcttacaactttgtcacccaggctggagtgcagtggcgcgatctcggttcactgcaacctcggcctccgggttgaagcgattctcctgtctcagcctcccggtagctgagattacaagtgcccgccaccacgcccggctaatttttggtagactcatggtttctccacgttgcccaagctggtctcgaactcctgggcgcatgcgatctgcccgcctcggcctcccaaagcgccagaattacaggcgtttgagccactgcgctgggaaactgtgtttatcattctgagtccagcggaatacagtgcccgtccaaaaaagtgctcaatgaagaatgaatgaatgaatgggtaagctctgggagaaataaccaggctggttgggcagggaaacgtccttctctgaactttagggttctcatccgtaaaatgaggataagcaacagtctccatctcacgggaactgaaggtatggctgaacaaaataggcttattgtcactacagtggcataaacacctcccttactcaaaacactttcaagggcgcagagagaacgctgtacgagtgagcagtaccgtaaactgttactgctctgggttctgtcacgggacagtgactactcctcactgaactgtggaagaggtggcccaaaaaacgcgagaagaaaagagaaagtttttagacgcagaacgcggctcgcggccaccagaaagcgtcctccgcctccgcccccagcgtccccgcgcccctgcgcggccgcaccttcacccgctgcgcctcgtttatgcactgctggtagctgccgatgtagaaggcgttctttacgtcgaacagctcgtctacctccccggagccgccggaggccgggccgggggccggaggcgccatttcgctgtcttctcaccagctcctcttcctgaaagacacgtcagccggaagcaagacacgggcacgctaggaaatgtagtttactttttccgagcggcggcgaagtaagccaatgggaagctccacaataatatgcaagggggcggaaggcgtaagtgcgtcacggagagcatctcgggaattgtagtgtgtttctgcaagccaatgggatccggggaaacatgataaggatgcggtcgaggctgggaataggctgagggagctggagagggtgggaccacgcaggaggcagatccaataaacaggaagatttttctcgtgacgtcgtcggcgcgcgccggaagcgcggatcacacgggcccctacaaggggcccctacaagcggccacaaggatggcaggcttcgcggagctcgggctgtcatcgtggctcgtggaacaatgtcggcagctgggtttgaagcagcccacgcccgtgcagctcggctgcatccccgccatcctggagggtgagtatggcccagggccttccccaagaggcctctccgctcctctcgactcctttcccttctcgcaacctttgcttattccggtcccacgaggcgaggggcaacctcgggcgttacaggagatccggggttccggaggacgactggacagtgttggcatttaggttgcatgactgactcgctttgtgttcgtacgcaagtgatgtaatctctgaaattttcatagtctcagcacagggagggtttgatggatgactagtccgatagtatcgcaaaatcctgcagacctggtactgctatctttattttacaaatagaagttgaggctgtcaaaattgctggtagatccaggactccttggtcctgtgattgctcctctaggagaaggtcttctctctgctcctctagcccaacccagtttcgccattaaagagaggcccacaggaagcctaagatgtgataagtcagggattaaataaacaaatgaaggggtcaacagggagcacaagatgcatatgagggaagggaattctggattccccaaattcacgtgctcctggacggagttagaacgaggtggtaggaagctgtgggcatctcgggtcaaatggatatgggttccagtccagcctgccactcactggcagtgtgtcctgggcaaggtctctgaaacccagctgtccacacatggagggtgttgatgctgctttgtccccaacccaggtcgagactgcttgggctgtgctaagacaggcagtgggaagacagcagcgtttgtccttcccatcttgcagaagctgtctgaggatccctatggcatcttctgcctcgtcctgacacccaccaggtaagcccccagcaggcctcctgggtatgggttaaccagctgtgctctcttgggcaagcacctttccctctctgagcgcccttttcccacgtgtgagatgagcatgaaaatcttgctacccgcttcttaggggtcctgcagaattaaacaagatggccccggtgcagtggctcacacctgtaatcccagcactttgggagctccaggtgagcggatcacttgaggccaggagtttgagaccagcctgaccaacatggagaaaccccgtctctactaaaaatacaaaaaattagctgggcatggtagcgcatgccgtaatcccagctactcgggaggccgaggcaggagaatcgcttgaacccaggaggcggaggttgcggtgagccaagatcgtgccattgcactccagcctgggcaacaagagcaaaactctgtctcaaaaaaaaaaaaaagaaagaaagaaagaggcaggcagcagaaagggtactgggacctgggcatattggagccagtttgagaaaggccttgaatgccaggcggagggttagaattgattctgggggtgtgtgagcaggaaaggtcatgagccagggagaggccaggacagagttggttgggggcagaaaggaggctgatgcttgagaccctctggctggggcaactggctggtggtgaggccattgctgaaaggcgaactgggggaaggcacaggtttgggataggaagagatgctgaggtcagcttgggtcgggctggtgaaggagggatgttccaggctgagcctggcgagggggcaggggccacaatggcctccaaggctcagcatcagagcctttgtgaacaggactgggcaagtcaggagcctgggggctcagggaggaaccctggggatggagaggggaatggggggcaggtccagaaccactacctgacccagcctggccccttcacacccacagggagctggcctaccagatcgcagagcagttccgggtcctggggaagcctctagggctgaaagactgcatcatcgtcggtggcatgggtacgggagctgggaggcgggggaagccccagcatgggaccctagcagctttggaccacctgcccagccctgcctctcatgctctgtcccccagacatggtggcccaggcgctggagctctctcggaaaccacacgtggtcatcgccacgccggggcgcctggcagatcacctgcgcagctccaacacttttagtataaagaagatccgcttcctggtgagttcgccccgcccctgcagacctcaggagctgggctcggagcctccaggcccaatgtcagagcctggggcaccatctcatccatttaggaaacgtatgtccgttagactgtccagtaaaacgctaggaacagtgacaaggaccgttcaaggaccaacaagagggggcccagtcctagcaatgttattcgggggtagggccttgctgagacttgggtgaggggcaggcctcccttggaaggagggtactccagggcctagggtccatgtccatgcctctcaaagaggcctgcttcaggggtggccaagacccggggccatggacggcaccctcacccctgcccccattggcacggcaggtgatggatgaggcagaccggctgctggaacagggctgcactgacttcaccgtggacctggaggccatcctggcggctgtgccggcccgcaggcagacactgctgttcagcgccacgctgaccgacacactccgggagctgcagggtctggccaccaaccagcccttcttctgggaagcacaggccccgtgagtccacagcccagacagcgtggggagggcagccccatcctacagacagggacactgaggcgtggcggtctatctgtccatccccagggtgagcaccgtggagcagctggaccagcgctacctgctggtgcctgagaaggtcaaggacgcctacctggtccacctgatccagcgcttccaggatgagcacgaggactggtccattatcatcttcaccaacacgtgcaagtgagcggggcccgcctctcccctcccaccgcccttcaaaggaggaggtggcccgacgtctttggtctgggacacacagccagtctcagcactccccagcctctgctcagcctggaggtcatgggggcttccctcaaggagccaaggtccctcaatctgaaggtgcagccggcctttggggttcctcagcccagccgttgatggaagggccaggaaacccctgcaagcagctgtttgagcagcccatttgctgtgttctgggggtgtcactgagctttcctgggcctttagtcccatctcagaggaagttgtgacaactaacaggcctggtgtgcgtctgcacagacagagacccctggggagggcagttcatatcttcattgaattgtttgggaaggtcattgagaagctggaggctcttccagcatgagccaggatagaagggcagaaatcaaggcgctttaaatgcgttacctcccagaagagaaaagttgggactgggtgcagtgactcacacctgtaatcccagcactttgggaggccgaggtaggcggatcacctgaggtcaggagttcgagaccagcctgcccaacgtggtgaaacttcatctcgactaaaaatacaaaaattagccaggcatggtggcgagcacctgtagtcccagctactggggaaggtgaggcgggagaatcacttgaacccggtaggtggaggttacagtgagccgagatcacgccactgcactccatcctgggggacaaagtgagactgtctcagggaaaaagagagaaaagtttggctgcagggtggctgtcaggcgtggcaggatccagcagcttatgtgatggtccccatcctttctccctgtgcccctctttctcctctgttttcctctgctggctccttcttggccttcttggtaacagtgaccacccctagcaagtcagtttccagccttccagccctgcagtcccagggccaactcttgtcagttccagctccagggagggatcagcagagaggacatcaggcaggcaagccgtctgtcaaccctcatcctgcctcttttttttttttttttttttgagagtctcacgctgtcccccaggctggagtgcaatggcgcaatctcggctcactgcaacctctgtctcctgggttcaaacaattctcctgcctcagcctcctgagtagctgaggctacagtcatacaccatcatgcccggctaatttttgtgtttttagtacagatggggttttgccatgttgggcaggctggtcttgaactcctggcctcaagtgatccacccgcctcagtctcccaaagtgctgggattacaggcatgagccaccgtgcctggcctgctgcctctcctttctaagctgcatgaggccactgtgctaggtgtctcaggggcgggtgggggcaggaacaccttcccagaacctgagagctggaggggttgacaggcacatccttcccgccaggacctgccagattctgtgcatgatgctgcgcaaattcagcttccccaccgtggctctgcactccatgatgaagcaggtgaggccaccctggggcccgccagcctcaccctgggataccttccccgcctcagacattggccccgatccttccttctgccgggcgccttcttcctgccacctggtctcttctggtcccagaatatcgcagctcaagaggccctccctgaccgcatctcttttagccgtcattcatttgtcccggtctgacttctcatggccaccttcctcaatggacggctggggactgtcccggcctccaccctgtcccgaggcctcacacagaaaaccctgccttcatgcattcccaattttcttcccaaccctgtgcagaaagaacgctttgccgccctagccaagttcaagtccagcatctaccggatcctgatcgcaacagacgtggcctcccggtgagcagcccccagtctcctgccaagggcactccctcttttactacaaggccccacagatgagaaggctggcctcaggcatgtcaggcagccctagcatccctgctgagtgaccctgggtgagtccttgcctcggtttccccacatggacagtggagctgaccagccacctctgcctccaggggcctggacatccctacggtacaggtggtcatcaaccacaacacccccgggctccccaagatctacatccaccgagtcggccggacggcccgtgcaggtgagcagtggagggggaggccgagccttgggcctctgtccctccagcctgcccagcaaattcaggtggtaggacgtgggtagggtgcagcccacagatgagagctactcagggccatgtttgcaagttggggagttgtcctttctaaagcaaaggtgaatcccagctactcgggaggctgaggcaagaagatcacttgaacccgggaggttgcggcaagctgagaatgcactattgcaccccagcctgggcaaaaagagcaaaactctgtctccaaaaaaataaaataaaataggccaggtgcggtggctcacgcctgtaatcttagcactttgggaggccgaggtgggtggatcacgaggtcaggagttcgagaccagcctggccaacatagtgaaacactgtcttactaaaaatacaaaaaaattagccaggcgtggtggagggtgcctgtaatcccagctactcgggaggctgaggcaggagaattgcttgaacccgggaagcggaggttgcaatgagtggagatcgcacaattgcactccagcctgagcaacagtgtaagactctgtctcaaaaaataataataaactaaaataagtaaataaaataaaattgtaaaataaagcaaatgcaagtcaggtgctgccttcacccaagccaggtgatgaactgagcagtgtggggctgccccctgggagggtgcacacacagctccggcccccactacttgctgctgcctcgtcagggaggggcatggtgtccatgagatgctgtcagttctgaagccaggaaagatgtggttgctggggtcggactgggcctggaccttctatcctgaccctgtggtgctgggcaggtcacttccactccctagacctcacatggtggataatgagaatggtgacgtcctcgtggggctgccatgagggtcacggaccttgtccaccatcagtgcagtttcggccctagtcaacgtcacagaaaacagcaagcagagatcttgggctgaggcccgtcagggctaatggctggcattacttagactgggttccctggcagccaagccaaaaagggaaatcgggcagtaactaactgctgtgtaaggccagactggcagacctgcctctccccagcgacccgtcctccacacagtggtcctgcttggggtcaagcccagacactctgggctgatccctcccaagcccaagcccttgttcagcatctccaggacccctgagctgtgtagctgtcaggatctacctttattcgccccatgtcctgacgcccagcacatagcagataaccggcacatccccacagggcggcagggtcaggccatcacgctggtgacacagtacgacatccacctggtgcacgccatcgaggagcagatcagtgagtggggttggggtgggtggtagagaaggaggggtggggtgggcagaggtgggcacctcggggtgagacccattttcccgtcagacaccagccggcctgctcccgtgagcagatttaggctggggcttccttccctaggcacccccaaaagaagttcttttgcccatttattgaaacaaactccccatagttgtcgccagcagctgaaagccacatcagtcaggaggggacttgggtttcttagactgagatgtatggaaggtccctgagatgtcagaggccccattgacagggcctggcctgctaaaaacccctgggaatggtttcatatgcagccaagacagagacacttcctaaggtatctctgatcactgcatagactgtcctgaaatttagaaacatctggacttggccaggcacagtggctcacacttgtaatcctagcactttgagaggccgaggtgggcggatcacttgagcccaggagttcaagaccaacctgggcaacatggtgaaaccccgtctctactaaaaatacaaaaattagccaggtgtggtggcgcacgcctgtaattgcagctacttgggagggtgaggcatgagaattacttgaacccgggaggcaaaggttgcagtgagccaaggtcgcgccattacgctccagcctgggtgacagtgagactctgtctcaaaaaaaaaaaaaaaaaaaaaaagagaaacatctggactttaaggccgggcacggtggctcacacctgtaatcccagcactttgggaggccaaggtgggtggatcacttgagcccaggagtttgagatcagcctgggcaatgtggagaaaccctgcctctccaaaaaatatagaaactagcagcacacgcccgtagttccaactactcaagaggctgaggttggaagattgcttgagcggaggctacagtgacctgattgagccaccacgctccagcatgggcgacagagtaagaccctgtcttcaaaaaaaaagaaagaaatatctggactttaaaggacactgtttgcaagaaattaatattcatggttaaactcataatgctgctaacaccgaaaaaaaatggcggggggaggctgaggcatgagaattacttgaacccgggaggcggatgttgcagtgagccgagatagtgccactgcactccagcttgggtgaccgtgagactctgaaagacagcggtccataccttccttacctcagaaatccctgatcttgctcagctgacccttacctgatatggccccagatggccttgcataccccacagcatggggaactcactacttggctgaactccctctccatgtcacgtctcctccccacccccacccccggctttgctgtccccacagagaagaagctggaggagttctccgtggaagaggccgaggtgctacagatcctcacacaggtcaacgtggtgcgaagagagtgtgagatcgtgagtgtcagaggcgggcaggaactaaagtgctctccagggccgggggtgctcccttccaggtggggcccccgtgaccagcatctccttaccccacttccctccaccagaaactggaggcggcccactttgacgaaaagaaggagatcaacaaacggaagcagctgatcctggaggggaaggtgagggccgagcccgcaggtagggggtgggtggccaggttccctggcgggggccgccagctcagccatcccctggtcctccctgtgccaggaccctgacctggaggccaagcgcaaggctgagctggccaagatcaagcagaagaaccggcgcttcaaggagaaggtggaggagacgctgaagcgacagaaggctggcagggctggccacaaggggcgtccacccaggacaccgtctgggtcccactcaggcccagtcccctcccagggcctggtctgagccccacacggccatctgcccagtccttgactcgtccatggagctgagggtcggaggaaccttccttgggggcagcagcccttcccgggggcctacccagtgccccacagcagaacccgtgggcgctcgtgttgtgcgggccctgctcctctgccccgaaaccactggctggtcccttccctgagccctggccaagattcaggctgcaggggaagaaagaacatgaccgggaggttgtgaccccaacccaaggtcaccccccaggggtgccgcatacaggaggtgcttaataaacgggtcttttgacttcctcagtctgactttcgaagagcagggggacaggagaggtggggtgcagccgctgttgtttctcaggtgtctgcccagaacaccatgtccatttccaccaggcaggcccaaagttttgcagacaccagctgctcgaatggccatgggattttgggccctgaagccccttctctgggcttccagtttcctcatctggagaatgggcatagcaactgccctgctctccagaggcagctgtgaggctttggtgaggtcagtcctgtgccgaatgggtgcagctataagcttccctggccacccacctggccacatctggggtttgtggccagagtgaaggggccatgaaagtccaaatttggccagacaatgtgggctaagcccaaggggacaggcagagagacaccagagccagcttcctggctgtgtggcctggacccccctcggactccaagcctcacccctcatctgcaagcggcttataactgctacatggattcaggggcacccaaaaagacgcagggaaaggcgccggcgacatgttaagtgcccagatacccacataccacacacacacagccacgcttagaaatgtaatcgggggatctagaaattctacacaatgagaagctcaaaaacagccccaaagctgccaacaaccagagccgactggggcccaccccagcccagcccggcccggcccacccagggctaagttgggaccccccagtccctttccaggacgaatgggcccaactatgccgcctgcagcctggcccgcatcccaggccggaatcgttcatagaaaaccagccccggctcagggcgcagcctcagccaggcgggccaggccctcacgcagctcactcagctcaaacaggctgacgtccagcagctgcgctgcccggcccacctcagcccgcgcccgctcccgctctgcccgtgcctcctccaggctgcgctccatcgcccgcagctggtgctccaactccgcattgcgggtctccaggtcctgccaggaaagggtgggcagggttgggggccccaacaaatcaccagtcctgcccgaggcatccagagtctgaccaccttcatgtccctcttctgcccagagccatcctagggcgcccaacacaccaggaataaaatgcacaccccacaggggcctagcttctgccctcatttcttttgtttgtttgtttgtttttgagaaggagtttcgctcttgtcgcccaggctggagtgcaatggcgtgatctcggctcactacaacctccgcctcccaggttcaagcaattctcctgcctcagcctcccaagtagctgggattacaggcatacaccaccacgcccagtgatggcttacacctgtaatcccagaactttgggaggcggaggcaggtggatcccctgaggtcaggagttcaagaccagcttggccaacatggtaaaactccatctctactaaaaatacaaaaattagctgggcatggtggtgcacacctgtagtcccagctactctggaggctgaggcaggagaatcgcttgagctcagaaggcggagcttgcagtgagccgagatcgcgccactgcactccagcctgggtgacagagtgagactccatctcaaaaaaaaaaaaaaaaggctgggcgcagtggtttacgcctataatcccagcactttgggaggccgaggcgagtggatcataaggtcaagagatcgagactatcctggctaacatggtgaaaccccgtctctaccaaaaaatacaaaaaattagccgggcatggtggcgagcacctgtagttccagctactcgggaggctgaggcaggagaatggagtgaacctgggaggcggagcttgcgccactgcactccagcctgggcaacagagtgagactccgtctcaaaaaaaaaaaaaagtaccccctgaacatttctcagataaagcctttagcaaaagccaagccaaggccagtcgtggtgactcaagcctataatcccagcactttgggaggctgagggcagattgctcacggtcaggagttcgagaccagtctggccaacatgaggaaaccccatctctactaaaaacacaaaaaatgcccgggcacggtggcgcatgtctgtaatcccagcactttgggaggccgaggcgggcaaatcatgagatcaggagttgagaccagcctggccaacatggtgaaaccctgtctctactaaaaatacaaaaaattagctgggtgtagtggcgggcgcctgtaatcccagctactcaggaggctgaggcaggagaattgcttcaacccgggaggtggaggttgcagtgagctgagatcgtgccattgcactccagcctgggcaacagagcgagactccatctcaaagaattaaaaaaaaataaagccaagccaagccagacctagttccaatgcaggctctgtgatctcaggctgagaacaggaggaattgacggggtctggcatgggaatacagcaggaactcaagcattgcttgttgaacccatagatggatatgaaactgtaccaacagccactgttcacgcggcacctgctgggcatcaggccttccacaggactgggcctcccaatactttatcatcttaggtagatattgtcctgagtgtctgttgaggtgactgtcacccaccgtcaccccacctccttgtgcccacacacacctgcaccttctgctgagtctcctcacgctcggcagcctccagggcctcgcggggccccccagtctgactcttcagggtctgaatctcctagaggagaagagttcccagggtctgttgcgggggtcctggctttcccacaggaggtgagggaaggcgaggcccaggaaccacacttggcactcacctggtccttggtttgcaccagagcttccagctgttccagcgactggccctggcccagcccctccttctcaccggtgggggtcacctctgaagctgcctgagcctccagctcagccacctgtagggcaggaatagcagcccctgacgcccccgcctgcactctcccttgctcgcccaacctctagggaatctgcctcctgtctggccacgcccaggaccgagcacccatctcccttggttggtgccaccacccccctctgcacagcttggactttagtgtctgatcaccctctgaggctggcattgtctcaaacccattttacagagcaagaaactgaggctgggtcagtgacctgctgaggtcacacagctagtccatgaacccagggcagatgggaactgccgaggcgcggtctccacagttgcccgggccaggtgggggtctctcggagggaggggtgccctcacccgctgccgcagccgctcggcctctgcacgctgagcctccagctgctgcctccactgggctgcggcggcgttggcctctcgcagggcgcctgccagcttgttgttgctgtcctgcagtgcgaaaaactcggcctcccactgtacctcgcccacggagctgcagagacacgagggtcggcagtgggtgacacggggctggggggcggagtcgggcgatgctgggctagggggcggggccaggggtgggatagctctgggcttaggtcagggcgaaggctggcgagggtgcggagtcgtgcgcgaagttggactagggggcggggcaggggtggagtggcactgggctgggggcggagtcagcggcaatgctcggttagggggcggggccagggtgggtggcgctgggctgaggcggagtcacgggcgatgctgggctagggggcggggccagaggaggggtggctttgggctagggcacggagtcagggccacgcagggctggggatgtggcgacactgattgctgagcttggggatggggcagtcccgcagaagcggggtcttgtcgaggaccgagtcaaagaagggggcacgtggagtccgcccagtgacactgtgggaatgttgagggagggatgggaggttggggagagtcagccgatgggggcgtggtcagggtggttatcctaagaccagagaggcatcgacggggcgaggttagcagcgagaagagacagggatggggtcaaaacagaggggcgtggccaacgcagggtaggggcggggtcggctctggatggggcagcattcagatcctcatccccttccccaggtcttgagtccacagttagatcccgccgtcctggcactcccttggcttccaagaaccgcctcctcgtcccccacccctacccccgcccctgccacgcccccaagtcccgcccctcacccctcagacaacatcttctttagccgctcgcgctctgtggggccgggggcatcagcgctctggctgcggaacagtttttcctcgccggggccgttggcactgacgagagggctcgggggcacctaggcacggggaaaagaataggtcacgaccccacatcagctgggatcaaggctgatgtgactggggtcgtcacatcgggggtgcaattgacctatgcaccctaagcaggtccttcacagcacaggatccaagtgtgtccctccccacctcacccaccctccatggctccctgtggcccctaagctgggagttccatgcccacgccctcgaccttgccttcctgggctttcaccacccccaggagcaagtctgatgcaggttagtctaaaccaagatacttagaacctgtaaggtaggggaggggtacaatcggacacctccctgctgttcccttccctgaggccgaacttcaacatcacgtttaggatttcagcaggaagccctgcccaggccgaattcgtgtttcgtgagcaaccccactgcctggaccactggctctgagggtagacaagctggcgggtgccctgcgagaggccagcgccaccgcagcccagtgcaggcagcagctggaggctcatgctttttttcatctctccaacccctgtgcacagccctcggcctggtacacagcaggtgctcaataaataatgctgaataaattaatgtgggaaaacacgcagggacagttcgttgttctgcctcacacttagccatttctttctttctttttttttttgagacagagtcacactctgtcacccaggctggagtgcagtggcacgatctcggctcactgcaacctccatctcctgggttcaagcgattctcctgcctcagcctcccgagtagctgggactacaggcgcatgccaccacgcctggctaatttttgtattttttagcagaggtggagtatcaccatgttggccaggctggtctcgaactcttggcctcaagtcatcctccctcctcagcctcccaaattgctgggattacaggcgtgagccaccgcacccggccacacttagccatttcaatttctagtcttccatcctgccatctgagctggttttgctactgggacctactgggtgtaccccaccggccccaggcaaggtccagaccctctatgacacactccacaccactcctctgtggtccctgctgtgggtctaaccttaggtcatctggaagcattgggtcttgacgaccagcagagtgccccggtctcccaatatcaaggtcccccaatatcagttgagcgcctggctgactcacaggtgcccaggcaggcataggggagtagggagtgctgacctggtgggaggcgagccccagggctggactggtgagctccccgccatcctgagatttctccctggccagcctggctgcttccttcacttcctggaacttctcggcaaactaagggagtggggaggaaaagacagtaaaaccccagcccatcctcccaaacaggtcaccatcactcagtgacagccccgccactttcgaaccgtacccatccccttatcacacaccttggaagaaggagagaaactttgaaaaatgatgtaccatggtgggtgggcaggtggcatcagatcacagaggtggcatttaaatacattgggccacattgagaaagggaaaggaattcccatgtcctctttttaggaaagggtctcactttgtcacccaggctgcagtacagtggcatgatctcggctcactgcagccttgacctccctggctcaagtgacccttccaccttacccctccaccaaggagctgggactacaggtgtgtgccatcatgcccggctaattttttctagagacggggtctagccatgttccccagaatggcccttttcctgttttttgttttttttttttttgagatggagtcttgctctgttgcccaggctggagtgcagtgacatgatcttggctcacggcagcctctgcttcagcctcatgagtagctgggattacaggcatgcaccagcatgcctggctaattttcatatttttagtagagatgtggttttaccatgttggccaggctgatcttaaattcccggcttgaagtgatccgcctgcctcagcctcccaaagtggtgggattacaggcacagcacccagccttttttttttttttttttggggggggacagaatctcgctttgtcaccctggctggagtgcagtggcaccatctcagctcactgcaacctctgcctcccaggttcaagcgagtcttctgcctcaacctcccgagtagctaggactacaggcccgtgccaccacgcccagctaatttttgtatttagtacagatggggtttcaccatattggccatgctggtctcgaactcctgaccccgtgatccacccacctcggcctcccaaagtgtgagaatgacaggtatgagccaacatgtggggtcccttttaatctttatcagggctatttcaacaaagagagcctcaggtgggtgctaatctgtctttaacacctgttattattcctttataacaaagagattaggtctcaggctctgagagacatcagaagtcaatgagaaagtaatcatctcattcttgtttttgttgtattaaatgtttacatgtttacatttaccacctatttatgacaaagcaataccagttttccagttaggataggatatgtttccccccaccaccccggttttaaaataaatttccttagtttaaaaataattttttaggccgggtgcggtggctcacacctgtaatcccagcactttgggagaccaaggcgggcggatcatttgaggtcaggagttcgaaaccagcctggccaacatggtgaaaccccatctctactaaaaacacaaaaattagccaggcatggtggtgggcgcctgtaatcctagtacttgggaggctgaggcaggagaattgcttgagcccaggaggtggaggttgcagtgagctgagattgtgccattgcactccagcctgggtgacagagcaaaactctgtctcaaaataaatagataaggccatgtgtggtggctcacgcttgtaatcccagcactttgggaggccgaggcaggtggatcatgaggtcaggagttcaagagcaggctgaccaacatggtgaaaccccatgtctactaaaaatacaaaatcagccaggcatggtggcacatgactgtaatcccagctacttgggaggctgaggaaggagaattgcttgaaccggggaggcggaagttgcggtgagccgagatcgcaccattgcactccagcctgggggacaagagtgaaactctgtctcaaaaaaataaataaataaataaataaataaatgattttttaggctgggtgcagtggctcacacctgtaatcccatcactttgggagcctgaggcaggcggattacctgaagtcaggagtttgagaccagcctggccaacatagtgaaaccctgtctctgctaagaatacaaaaattaaaaaaacaaaaattttgtaaaaatacaaaaattagccaggtgtggtgtgtctgtaatcccaactacttgggaagctgaggcaggagaattgcttgaacctggagagaagaggttgcagtgagccgagatcgggccactgcactccagcctggcaacagagctagactctgtctccaaaaaaaaaaaaaagacctaaattagaaaggtaaattgttggggccgggcgcggtggctcacacctgtaatcccagcactttgggaggccaaggtgggtggatcacgaggtcaggagatcgagaccatcctggctaacacggtgaaacccccgtctctattaaaaatacaaaaaaaattagcagggcgtggtggcaggcgcctgtagtcccagctactagggaggctgaggcagaagaatcagaagaatggtgtgaacctgggaggcagagcttgcagtgagccaagatcgcgccactgcactccagcctgtgcgacagagcgagactccgtctcaaaaaaaaaaaaaaaagtaaattgtctgggtgcagtggctcaagcctgtaatcccagcactttaggaggccaaagtgagaggctcgcttgaggccaggagtcaagaacagcctggacaacatagtgagatcctatctctaaaaaaaataagattaaagatattagctaggcatggtggcatacgcctatagtctcagctagtcaggaggctgaggtgggaggatcccttgtgcccaggagtttgaggctgcagtgagccatgattgcactgcttcactccagcctggacagcagagcaagatcttgttaaaaaaaaaaaaaaaaagaagggagggagggagggaaaaaaaaagaagaaaggtaaattctaaaccttctagaagaaaacaaagaaagcctggtgtggtagctcatgcctgtaatcccagcactttgggaggccgaggcaggtggatcatctgaggtcaggagttcaagaccaccctggccaacaaaatcccatctccactaaaaatacaaaaattagctgggcgaggtggtgggcacctgtaatcccagctactccagaggctgaggcaggagaatcgcttgaacccgggaggtggaggttgcagtgagccgagatcgtgccactgcactccagcctgggggacagagcaaggcattatctccaaaaaaaaaaaaaaaaaaagaagaagatcttcgtgaaagcactcatcatcaacaaaaccacggataaagataataatggaagtatagagacggcacagggtgcagggaggtgaggatgaaggtattgctggggcatgtgggaaagtgcccagcccagcccagccacccatttgatgtcccaaagaggagcagggtgtgtccaaaattagagctacaggcagtagaactaggactcaagagcaggtacagtggctcatgcctgtaattgcagcactttgggaggccgaggcaggcagatcatttcaggtcaggagttcgagaccagcctggccaacatggtgaaaccctgtctctaataaaatacaaaaaattagctgggcgtggtggcggactcctgtagtcccagctactcaggaggctgaggcaggagaatcgcttgaacccgggaggcggaggttgcgtgagccaagatcactgcagcctatctcaaaaaaaaaacagaaaaatgaactaggaatcaaaccggggaagcttaaaggggcttcagtctcaactcatcctacaatcccatcctgcagatgggaagataggggacctgcccaagatcccagagtgagcccaggagaagacttgggcccagtctcatcggttccctccactctccccctcacccggcccacctgtgtcagatgctgttcagaggcaaagcccaggccgtagactgtgttggcgcgactgtcggcccactgcccgaacttctgggaagttttggtgaaggtcatgttgggagtgacagtgctgttgatgatggcctagggtcggggaacaaagttcaaggtagatgggacagatactaacaaacatgaaaccccccaggtattaccttgtattagggtcttgaaggtctttactctgaaccctttcaggagatagagactagggcctgggaaggcttagggtttcctgtcccttgggcacacagcaagccagccaccagacccaaggttgtcaccaggactcctggtgcctctgccccacccagaccccaccctgaccttggcgcctccgatgctgatgatgcggtacacattgcgggtggcatcgtagaaataggagacagtgagtgcgtgcttgcccgctgggatccagtttcgcttggtggctgggtcaatttggaacacgtgcgcccgtgtgctgaagattggctgctccctgcgtggggagagggtgtttggtgggggccaggcacccccacttagaaagctcagggccaggctgggggaggtgggagctcacctggctgtggacattggtcaggctgggatgggcaggctctagggggcagccagagaggtggcaggagcactggtttggcccctagggagagaggagggactatgagtgtccctcaggccaggctgagggaggccaagcaggttccatctcaggacccatcaccaggtgtgcccgtcatggaactttcaatcaaaaaggcaggagaggcccaaagtacacctggtgctttgggaggctgagtcaggaggatcctttgagcccaggagttcgagaccatcctgagcaacatggcgagaccccatctctaccaaaaatttaaacaattagctgggtgtggtggcatgtgcctgccgtcccagctactggggaggctgaggtgggaggatcacttgagcccaggaggtcaaggctgcagtgcagtgagctatggtcaggccactgcactccagcctggacaagagagtgagaccctgtctcaaaaaagaaagaaattataaaaagaaacaaaaaggtaagataattattatagataactcagagcaagcagaccccatctttctttgtctaggggaagcccccacaacaccctgtacaggagatggccctctgagaggagcctggtggccgctgacatccagatgtaaatttctcattgtcctggttattgcacccccgtgaagtcccctccatcccaggctgagctgtggaggccaaatctctgctgagttctttccaccacattcacccatgactggccagagcggggctctccaccaaaaaatggggcgttgagaggtgtgtagtaccaggagaccagttccccactacaccctgcagagggaccccacccccagcagctcccaccctagggcagaagcacaccttgaagtccagagtccaaatccccagggagcccccagccaagttaaaaagacaagatgtagacaaacagccaatcccaatgcccaccatgagggcagagcagaatccacactgggagaccagggctccccaacctccccattgggccattcagcaaccccgaatctgcaggggaccaaggaggagtttggaggagggggaagacaggtgggggaggggaggccctggcccagcggcctctgtggtcaaaggggggatgccccccctatcctgtcctgggcagctgctgtcctggtcacagggtctgaaaccggagcccctgagtgggggtggggcggcagctctggcctggactgggggcgggtcctgcgccgggtgggagttggggaacacaggggtccccggaacccaggcccttccggtccggcagctcctgctgcgacttgcagcgtttggggaaagttactcaccaactagtcatgcgcctcggatgccgccggccacggggctcccggaggggggtccgacaccgcccggtgcccgggatccccaatctggccggtggatgaggccccatcccatgcacccgagtgcgggggacgggggggttaatattaattcaggatcccatccccacccgaggcaggacacccagtgcacgccccaactccgggacgcgggctctgaccctggaacttccgagattcccgcgacgccccctgtctctgggtccagaacttcgggggacacctcttctgcctcctccaaccccaggtcggtaactccggggactcccttcgtgactcctcctctaactgggtccgggaccccggtcctccgcgttgtcctagactcctaaacttcgaggaccccctgccacccctccagtccctgggtccgggacgtccggacccctcccaccccagtaccccaccccaggtccgcagctttggggacctcttcgcagcctcctccaacgccgggtccagaactttgggaacctcccacgcagtcccctctcagaccctgaatccagaacttcgggacccccgcgctccctccagccctggaacttggggacccctcgcgccgctcccagtcccgggtccgaaacttctggggaacccccacgccctccccttggccctgggacttcgaggcccccgcgctcccagcgcaggctcggcaggccgggctcaccctgccaggtcggcgccccgcgagtgtccaggcgcgagtcgggtgcggcccccgcggcgctgactccgcgctgccgggcgccccgctcgctccctggctcccgggcccgcgccctccgcgccgccctccacgccgcccgtgcctttgtctgcgccgccgccgcccgcgccgcctccggtcccatcgcggccggtcccgacgcggccgccgcccgccccgcctccccgggccgccaaggccgccccgctgcgccccctgccggctttttgcactgggagagggtatgggggaggggataagggggaggggcgggggccgggactggggaagggacggaggattgagggagggggttaggggcggtggagggggagtgggggggggggttgcgtggggtcgggttgggagcagagggtggggacagagagacagacggagagggacatctgggatgagaaagagacccagaaacagagacacgggggagacaggcggagagataggaagcagatggagagagttgcacggacagcgatgtgacctcaccctcctgtcaccttctcaggagacagctgcctctgtccccactacctgaggtcataactttgggcctgtgagggaggtcaggtccctcccgggctgacatgggtggcccagtgaggttggggagggggcagtgggtctcagggtctgcatacagtaagtgctcaatgggtgttgccaggaaacggaagagatcaacttcgggagggaacgggaagcaagacaaagagagagaagcctctgttcccctgcccgtcccatccctaagcagggacgtctgtccacctctgtccctcccaagacgatggtaaaaatgcccacaatggttggattaaggttatctttgctgttgtttgagggttccaaaatccaaaggctgaggaaatgtctccaacgcatggttgcatcccctcagcctccactggcctgcgtttgtcacctctggtcacagggagcacccccttcccacacttgccaggagagcatccttccggagttgaactaggatccacctccccagccccaagcccatgtgtcccacttgtcaatcctggtgccgccccctctctggcaccgtctccaaaatcacacggtgcggcgccgttggttcgtttgtggacagaggtcctgcagctccctggaaccaaggcctgtggcgccctaaagctctgatcttacatttgagtttttcttttcttttcttttcttttttttgagacaaagtctcactctgttgcccaggctggagtgcagtggcacaatctcggcttactgcagcctctgcctcccagattcaagcaattctcctgcctcagcctcccgagtagttgggactacaggtgcatgccaccacacctggctgatttttgtatttttagtagagatggggtttcaccatgttggccagtctggtctcgaactcctgacctcaagtgatctgcccccctcggcttcccaaagtcctgggattacagacgtgagccaccacacctggccgacacttgagtgttttgacaacttcagagaggcttttgcttttcatctccaagacctctgctcctgtctcctttccctgttcctttatttctgtttccttctaagaagaatagtatatctgagctggcggttacattacattcaaattacctttaggtgaattccaggtcaggttgtttttggagattgactcctgcgccaagatctgagtcttcccccatccaggcctttgcccaaactgttccttccacctggaatgccctcgctgcaggcatctcttctgccttgtccttccaggctcagcgccaccaccctgtctcctcctccaggaagcctctctgactaccctggccttggaagggatcttgccctcccctgtcccaatccctgtgactcttttttttttcttttttaaagtttatttttagagacgaggtctcactatgttgcccaggctggtctcaaactcctaagctcaagtgatcctcccacctcggcctcccaaagtgctgggatgacaggtgtgagcccagaccctttctgtgactcttatgttacctgtttattacatgaccaggtctgggtgctcctctagggctggcccatccatcctgaagccccagtctgacccagcacaagagcgactgttcatcccacaggggaaactgaggcacagactcggtttccctggctgcttctaacttcacgaggcatctgcacaagggaaggatttggctctgttctcaggccggaagccacgaaatgcttgaacattgtggggagcaaagaaaataccgtctgttctgtgcaaaaaatgacttttccttattaccaacaaaataatggaaaaaataaaaaagtatctgggaaaggtgctggcatggccaaggcttctggaagctgcttagagtttgccaagtgcacaagtggggccctgtggctattttacaggggcggctgggcgaggggcccaggcagactttgccctttgtgtgggcagaaagcaacagtgaaagagacagtgaagggttgagttgctttcctgaacaccctctccggtctctgggaggggctgggacagggctggccttgagcagccccaacctgaagctggactagccaagtctacactgaggcactggcttcctcagtgtgggcctcagttttctcacctggaaaatgggccgatgcttgcagggcttctagtagagggagaaacatgaaggatttagtcaatatcagcagctgtcctctggggtgcctgccattaggttcgtgggcaaaggccctgccactctttgctgcagctgggaaaacagagtctgtgtctcagtttccctgctgggatgaatagtcactcttatgctgggtcagactgaggcttcaggatggatgggccagccctagaggagcacctagacctggtcatataataaacaggtaacataagagtcacagaaaggggctgggctcatgcctgtcatcccagcactttgagaggccgaggctggaggatcgcttgagctcaggagttcgagaccagcctgggcaacatagtgagacctcgtctctaacgagggctgccctgagctgctgcccccaccccagtctgggccctcttcttcctaggtctggaggcctctcttctaaagaactgggctgggtgcagtggctcatgcctgtaatcctagcactttgagaggctgaggcaggcagatcacctgaggtcaggagtttgggaccagcctggtcaaaacatggtgaaaccccgtctctactgaaaatacaaaaattagccggacgtgatggtgcacacctgtaatcccagctactcgggaggctgaggcaggagaattgcttgaactcaggaggcagaggttgcagtgaactgagatcaggtgactgtactccagcctgggtgacagaaggagactctgtctcaaaaacaaaaacaaaaaagggtgggggggagggaggaaggaaggaaggaacagacttgagatgtccttgcagggcaggcagaggccaccccaaggtgtctgactaggaaagcaactttcctttggggctgaaaaatggtgtgggagaatgagcttcccaccttaaaggggaaaccaagcgggagcctgaacagctcattcagcactaagaaaactgcatttgcagaatggcttttatggctcaggctctggtctctgcctagttagatctgacctagcctttggagtgaggctaaacagtctctcctctccagagactttctgtgccaccagagcagggacagtccacctgctcttcccgaaagctgggtgcccacctcccagtgaaggtcttggtgactacttcaggtctgtttattgtttatggcatgatttggttactgttcacctcttacatggatttgtccctgcacctagaacaagcctgacctgtgacagctttctttttttttggagatggagtctcactctgtcgccaggctggagtgcagtggcacaatctcggctcactgcaaccttcaattcctgggttcaagctattcttctgcctcagcctcccgagtagctgggattacaggcactcgccaccacacccagctaatttttgtatttttttttttagtagagacaggatttcaccatgttggccaggatggtctcaatctcctgacttcgtgatccgcccgccttggcctcccaaagtgctgggattacagacgtgagccaccgcccttggcccctgtgacagctttctatgagcactttcaggagtaggagatccccaggttccagctttcgacttggctttcggaatcacgtgagccagggagtgaatcccagccctgctgcttaccagcagtgccaccctgaagaagtcactttcccttctttgtgcctcaggttccccatccataaaatgggcatacgaatggtgttcacttctgaggtttactgtagggatccaatgagttctttctttttcttttctttttttcttttgagacagaatcttgctctgtcacccaggctggagtgcagtggcgcaatctcggcttgctgcaatctctgccttccaggttcaagcaattcttctgcctcggcctccctagtagctgggattacaggcgcacgccaccacagccggctaaatttttgtgtttttagtagagacaggggtttcaccatgttggccaggctggtctccaactcctggactcaagtgatccacccgccttggcctcccaaactattgggattacagatgtgagccaccacgcccaccctttttctttcttttcttttcttttcttttttttttttttttgagacagggcctcactctgttgcccaggctgtagtgcagtggctcaatcatggctcactgcagcctcaactttctgggttcaagcaatccttccacctcagactcctgagtggctgagactacaggtgcacaccactacgcctggctaatttttgtattttttgtagagatggggtgtcactatgttgcccaggctggtctccaactcctggactcaagagatctgcctgcctcagcctctcaaagggctgggataacagatgtaagccactgcatctggcctccaatgagttgttatgtgaagagaacgtgattgtaggtgcttaataaatgcttgctgttataaacatcatatttatttttggtatgtggttttgatcctgaaccaacctcttactcttttctttttcagaagttagaggactccaaccaggcctgaactctcaaggacagaaatgggtccaacctggcatgacatcctctaaatctttagctcctggcctctcaggtgccccctccagctacctccctcttccttctcttcattccccaagccatagctggttgggccaacctccagacattagcctctttgcaaactcctattcatccctcaaagcctcaccttcaatgctctcctccccaagaagctctctcctctacctctagaccttttccagccctcttccctctttctggcccagccctgactcctgggagtgtctgtgtgcagctttgactcccccagcctgagtgtctctcaagggctgagaccagggcccatgtttccctagagtttgtcatcttccagcatagtgtggacgcatgggggtcaggcaaagggggagtttgatgactcagtactattggtgattttgcatcacttgaaggagaccctgccttaaattcagaacttgacttctgcccacggctaaagttaattcattcaacaaccccccatgaagcaatggagccaggctccctcaggcccaggcaagaaagggtcgtggagttggggtcgccagcactggtttatggatttgaggacctaggaccagagtgagttggggatgggaggaggcagtgcttgaggcccctctgagcagcaaacctggacccgaggttcagttcccgcagacctaattaccctaatttgccacatgcactaattacctcctgggtgccaggtggctgggcggggctgccccaatttccggaggtaggtcggggcccgattatttttggctgtggcgtccttgaagcctccgccatcagcagcgcttgaagggcagaaagtggggcggagaaattgaggccacatcaggggaggcactgcgggaattgggggtcggctggccttggagctccctgaacagggggccttgggcccaaggcctgagagtctttggcacctagccagaggtggcaagatctggaggggcatggccaggcacgatggctcacacctgtaatcccagcactttgggaggctgaggcaggtggatcacgaggtcaggagttcaacaccagcctggccaatgtggtgaaaccctgtctctattaaaaatataaaaaattagccgggcgtggtggtgcattcctgtagtcccagctactcaggaggctgaggcaagagaatcgcttgaacttgggaggcagaggttgcagtgagccgagatcgcgccactgtactctagcctgggcgggagagcgagactcttgtctcaaaaaaaaaaaaaaaaaaaaatctggaggggttgagaatcagccagctccatggtggattggtttgaagtctttttgttttgttttgagacagagtctcgctgtcatccaggccagagtgcagtggcacaatctcggctcactgcaatctccccctctcaggttcaagcaattctgctgcctcagcctcccgagtagctgggactacaggtgcgtgccgccacacccaactaattttttcatttttagtagagatggagtttcaccatgttggccaggctggtcttgaacacctaacttcaagtgatccgcctgcctgggcctcccaaattgctgggattacaggcgtgagacaccacgcccggcccaggtctgtttttgatgtgataccatggccgggaaaggggctgccagggggtgggagtgggggtagtcagatgggcctggtttcatatcccaagtcccaccagcttgctgtgtgttcctgggcatataacctttcatgaactctttgcacctttcctgagggatgaaacaggtgtaatttaaaaagggtgctttaggcactgggggtcggagcatgggcaaaggccctgaggtggggccaggcaggacatgttgctggtacattagacaggtgtctagagtggagtaagtgggagaaaagcttatgggactgctgagacctagggggtcacaggaactgagcagagccttgtgggtcttggtgagttgtgtgggtttcattctgaaggcactggggagccatggggagtttggagccagagagagagggagtggtcacattgacactgcaggccctgggcagggtttcagctcttaggaaagaacgaggtgtctgtccatgtgcagaatggtcgcagaccctaccattctctgagcctcagtttccccaccctgagcagagtcctgagactagggcagccccagaacacagtgagccctctgccggggaagccccactctaccctggagctcccaaatgctggctgtgcagcctacacggcctcctccccgcctgtccccccatcccacgctccttctgtggccttgggggagcagctgtgggaacagagagcagaagcccgtggggaaggcagctcagagggcctctgggggccgtgttcctgcttggtgacagcccacgtggggctgccgcgcgccgaatgttctcacagcagccaggtgactcacatgctacagcctcttccctgggtctgccagagggagagtattcctagtccccaggcacaggccggggtctctggtttggccacctgtgccctggctatgccctctaggatcccccccaccaacacacaccaagggacccctctaactggcgatgctgcccacctccttgctccagcatcttccgtggctctcctggacacctcagagagaggctcaagctcctcattgcccattggtcaagctgctcagccccacttcagagcacttgtactgggtcccacgtatggcctgaaatgccagctctaaggccatctcctccaggaagccttccagccctccccacaactctgacaatcctgacccccaggacgaggatgcgtctgtgtctggccctgcctccctcccagactgggggctaactggagtccaggcccaggacccaggcctctcaggggctccactgttatccagtataggagtgcacagcaggggctctgggggaggaaggcaaggtccaagtctggaccccatgggcctgacatgtaaccaaattatttatgtatttatttatttttatttatttattttttttgagacagagtctcactctgccacccaggctggagtgcagtggcgcgatctcggctcactgcaacctccatctgacaggttcaagcaattctcgtgcctccgcctcctgagtagctgggactacaggcacgtgccaccacacccggctaaattttttttgtatttttagtagagacggggtttcactgtgttagccacaatggtctcgatttcctgacctcgtgatccgcccgcctcggccttccaaagtgctgagattacaggcatgagccaccacgcccggcattaatttttattttttgagagacaaggtctaactctgccgcccaggctggagtgcagtggtgcgatctcagctcactgcagcctcagcctcttgggctcaagcgattctcctgcctcagcctcccgagtcactgggattagaggtgtgagccaccaagcctggctaattttttaatattttgtagagatggggtcttcctatgttgtccaagctgctctctaactcctgggctcaagcaatcctcctgccttagcctcccacagtgcggagattacaggcataagccactgcacctagctaacccatttcatagaagagaaaactgaggctcagggagcttgtcagttccccaaagtaaaagtcagcagaaggctggaggtggtagctcatgcctgtaatcccagctctttgggaggcggaggcaggctgctcacctgaggtcaggagttcaagaccagcctggccaacatggtgaaaccccatctctacaaaaatacaaaaaaatgggccggccatggtggctcatacctgtaatcccagcactttgggaggccgaggtgggcagatcacaaggtcaggagataaagaccatcctggctaacacggtgaaaccccgtctctactaaaaatacaaaaaattagccaggcatggtgacaggcgcctgtagccccagctactggggaggctgaggcaggagaatgatgtgaacccgagaggtggagcttgcagtgagccgagatcgtgccactgcactccagcctgggtgacagagcaagactccgtctcaaaaaaaaaaaaaaaaaagaaaaagaaaaaaataaccaggcatggtagctcatgcctatactcccagcactttgggaggccgaggtgggtgaatcacctgagatcaggagttcaagaccagcctgaccaacatggtgaaaccctgtctatactaaaaatacaaaaattagctcagtgtggtggcacacgcctgtagtcccagctactcgggaggctgcggcaggataatcacttgaacccttgaacccgggaggcagaggttgcagtgagccaagatcacgccattgcactccagcttgggtgaccgagtgagacttcatcttaaaaaaaaaaaaaaaaaggccgggcatggcggctcacgcctgtaatctcagcactttgggaagccgaggcgggtggatcacgaggtcaggagatcgaggccatcctgactaacacgatgaaaccccgtttctactaaaaatacaaaaaattagccgagcgtggtggcaggcgcctgtagtcccagctacttgggaagctgaggcaggagaatggcgtgaacctgggaggtggagcttgcagtgagccgagatcacgccactgcactccagcctgggcaacagagcgagactctgtctcaaaaaaaaaaaaaaaaaagtcaccaggaggctggaggtggtggctcattcctgtaatcccagcactttgggaggccaaaccaggcagatcacttgaggtcaggaattcgagaccggcctggccaacatggcaaaaacctgcctctagtaaaaacacaaaaagtaacccgggcatggtggtgtgcacctgtaaccccagctactcaggaggctgaggtgggagaattgcttgaacccaggagtcagaggttgcagtgagcccagatcacaccactccactccagcctggacgacagagtgagactttgtctcaaaacaacaacaacaaaaagtcagcagagaggaaaggctggtcctggaaccccagtctgagaggccaagtctgctccttgcaacctctggagctttgcttacccagggagcaggttggggggtttgctcatccacctgcaggtggatttggtgcagcctgggctcaaactcaaggggtccaacagcccttcctccctgagcctctgtttcctcctctgtaaagcaaggattattcatcattaactcatgtttattaagcacttaaggcatccaggtctgttaggacaccctgccctcagggacctcatgtctggtagacaagggaacgaggaaatgacttctgacaggattttgcaaaagaaagaaaaccaggcaaagcaccaggtcaagactgcagtggttgctgaaggctactttgtggaggtggtgattcagggcaatagcacgcccaaaggccctgaggcagggatgtgttcagccccttgggacagcattgaggaggcggctgtgactgaagcaaagtgagttgggcagagtggggagggcaccatgtaggcagggagggctacaggctgggcatcagggacctgtgggtccccaggaaggaatgcagactttatacttagagcactggggagccacataaggcttttgagcaggagagggcatgatctgctttttttttttttttttttagacaaggtctcacgctttcacccaggctgaagtgcagtggcgtgatcatggctcactgcagcttcgacctcctggtctcagatgatcctcccacctcagcctcccaggtagctgggactacaggtgtgcgccactatacccagttgtgatcttcttttgtgtttaaatatttgcagccgggtgcgatggctcatgtctgtaatcccagcactttgggaggccgaggcaggaggatcacttgagtccaggagttcgagaccagcctggccaacgtggtgaaaccctatctctactaaaaatacaaaaattagccaggtgtgatggtgcatgcctgtggtcccagctattcgggaggctgaggcaggaaaatcgcttgaacctgggaggtggaggttgcagtgagccgagatggcagcattgcacaacagtctgggaaatagcaagactgtctcaaaaaaaaaaaaaaaaaaaaagatttgcagccaggcacagtggctcacacctgtaatcccagggcctgagggaggaaacttgtcttcataaaccctttcccatcttcctctgtctctcacgaggtcctggatgctggcctccgggtcttatcgctgaaatctcaggcctccaacagcagggaaacatctgctttccggagttcaaggatcttccagcccggacggaggtcacagggaaggaggatcgctgaaacaaagagaaagggtcacacgttgggcgctgactgcatcaacaggggagacactggccaggtgcggtggctcactcctctaatcccagcactttgggaggccgaggtgggtggatcatttgaggtcaggagtttgagacaagcctggacaacatggtgaaaccctatctctactaaaaatacaaaaaaaaaaaattagccgggcattgtggcacacacctgtaatcccagctactcaggaggctgagtcaagagaatcgcttgaacctgggaggcggaggtttcagtgagccaagatcacgccactgcactccagcctgggtgacagagtgagactccacctcagaaaaataaaaacacacaaacaaaaattagccgggcgtggtggcacacatctgtagtcctaactactggggaggctgaaacaggacaactgcttgagcccaggaggtcaaggctgcagtgagctcaaattgcaccgctgcactctagcgtgggggacagagcgagacctgtcttgaaaaacaacaaagaaaaaaaaaaagaaaaacaacaaagaaacaaatcccaaagtcaatggggaccagagtctggggaagggtgtcagtacacccacatcttggggtcccccctaacaccttggggtccctcaggctttggcatctatcctgggacccaggagggatatagctgctggtggctgggccaagcccttggtggtaaccccactgttctggggggtaccatccagggaggtcatgaccagtagctgaggggttcctgcagggcccttccaggtggtaggtgctcaggagttggctgttaacaggtcaggagagtgagaaacagaaagaaacatagacatacagacttggagagcagttgcttgggggctggcctctcgcttctagatgagaccctctcctggggggccactcagagtccatctgggacaccacagccatgcccacatgcaaaacagacattgtgtaactggccagtgacctccaactcacatctgccagagccctccaccttctagcagtcacagggcccagggtgggtgttgagcagcatctggacctggctcgaaggcagctgtctggagtcctgtgggaggaggggctggcccttgaaaaggcacctggggagaccaggttggatacagggatgcaaggcacaggcgcactagggccactaccagtgtgacagtctacactgggctcttcgaagggtaggcggggtgcttagagagtgttggggctcaagctacacctttccacttcctcacatgttcatgcacccactcaatgcctatccatccatccacccacccatccacccacccatccactcattcgcccatccatccatccatccatccatccatccatccatccacccacccatctgcctgtccgtccatccatccatccatccatccatccacccacccacccagccatccatccatccatacacctatccatcttcccatccatccaaccatctatccgtccacccattcttccattcatccatccatccatccatccacccacccatccatccatccatacacctattcatctgcccatccatccactcatccacccacccatccatccatccatacacccatccatcttcccatccatccaaccatccatccatccacccatttacccatccatccacatatccacctacccatccatccattcacctatccatcttcccatccatccaaccatccatccacccacccatccacccatccacccatccatccatccacccacccatccatccatccatacacctatccatctgcccatccatccacccatccacccacccatccagccatccatacacccatccaccttcccaaccatccatccatccatccacccatccacccatccatccatccacccatccacccatccatccatccacccgcccatccatccatgcatacacccatccatctccccaaccatccaaccatccaatcatctatccatccacccattcatccatccatccatccatccatccatccatccattcatccatccatccacccacccatccatccatccatacacctatccatctgcccatccatccacccatccacccacccatccatccatccatccacccatccacccatccatccatctatccatccatccattcacccagccatcttcccatccatccaactatccattcatccatttactattcatttatctatctatacacccatccatccaaccatccaaccgtgtgtacactcatcttcccatatattcatccattcatcgatccattatttatccatccatctgcccatccatctgcccagtcacccatccagtcatttatcttccatcccccatccatccccatccatcccaccattcaccaatcccccattcctatcccatccatccatgcttccatccatccaccctcatatgcaggcatcatccatgatccacccaactctacttccacttctcatacttctactcattcttcaagccccaactccatgtgccttcctccttgcagcccttggtgtggcccagaccctccctgtcccttcctctcacccaggcccaacccatggagcgaagagtgaatgcacctggctcagctttcagactggaggctgctcgagagcaaggcctgaggccgaggtttcttgggggcccagcagcaccagtgtgagggggcgccgaggagaagaccagcaatttctgcctgtgggccattgaggcatcaggcctccaggtcaggggggataccaccccacccaccaataataaagcccctgtgatttaagcccaataaaaaggcccggggaaggaattcaggcttggcctgaggccactctggggtcagcaagagctccagcgacagatatatctgggtttgtgctccactttgtcacatgtgcactgtgtgacactgaagaggtcagtttacctctctgagcctcagttttcccatttggaaatcaatctgtctcatgttaattgcacatttacaaggagttgaggcccacatcaggccccatcagctgggatgtatcagctccactccaggggaggggccaggaggagctggggtgaggagaacaggaagggaggttgagaaggtggatggggccaggcgcagtggcttatgcctataatcccaacacttttggaggctgaggcagaaggatcatttggggccaggagcttgagaccagcctgccaacatagcgagaccccatatctacaaaatataaaaagattagctgggcatgatagtgtacaccagtggtcccagctactcgggaggttgaagtgggaggatggcttgagcctaggaggtcgtggctgcagtgagccgtgatggcgcctctgtattccagtctggatgacagagtgaaaccctatctcaaaaaaaaaaaaaaaaaaaaaaaaaggtggatggcactggtggggggatgggaggggtgtgggacataggtgtatgtttcctaatggattcagagttccatattttctttttcttttcttcctttttttttttttttgagatgaagtctcactctgtcacccaggctggaatgcaatgggatgacctcggctcattgcaacctccgcctctcaggttcaagcaattctcctgcctcagcctcccgagtagctgggattacaggcacgcgccatcacgcccaactaatttttttttttttttttgagacagggtcttgctctgtcgcagagctggagtgcagtggcatgatcttggctcactgcaacctctgcttcctgggttcaagcgtttctcctacctcagcctccccagtagctgggattacaggcactcactactatgcccagctatttttttttttttatgtatttttagtagagacggggtttcaccatgttggtcaggctggtcttgaactcctgacctcattttctgcccacctcggccttccaaagtgctgggattacaggcgtgagccaccacacccagccaatttttgtattttttagtagagacggggtttcactatgttggcgaggctggtctcgaactcctgacctcaaatgatctgtccgcctcagtcttctaaagtgctgggattacaggcatgagccaccgtgccggcctcttttctgattctccaaataatgtatgctcattgtaaaaacagttttagaaagcacagacacgtgtaacgtaaataatctaaataggtcccttgtcatagcgtttaatttcctttctgaatttttaatacctatttactttatgcctggtgcttattggtaaattttaaaatgctggcacaggaaacaaactaagtaaacaaattcagatgccatccttgcccttggccctagctgacacggaccaggtgctctgtaaatatctgttgagtgaacaaaattttaaaaataaaatcaatgcccagaaataactgttactaacacgatggtctatttccatctagattttttttctttctttcttttttttcttagcccaaatggaattacactatacacatgatttgtcagtcaaggccaaattccagtgtacattcttgagttcagagacttcagcatcactcaccttgaagcttttctatggtttgttaaacagatctcctatggttggacatctaggtcactctctggggacagcctaacaaatagaataacacattttcttttttttttttttttttctgagacagtctcactctgtcgcccaggatggagtacagtggcgcaatctcggctcactgcaacctccacttcctgggttcaagtgattctcctgcctcagcctcccaagtagctgggactacaggcacccaccaccacggccggctaagttttgtgtttttagtagagatggggttttaccatgttggccaggctggtctcaaattcctgacctcaagtgatcaccggcctcggcctcccaaagtgttgagtttacaggcatgagccaccgagcccagccaaacacacgttttcaagttttctccttctccttttcctttttttttttttttttgagacaggggtctcagtatgttgcccgtctggagtgcagtggctattcacaggtgtgatcccactactgatcagcacaagaattttacctactcagtttccaacctgggccggttcacctctccttaggcaacctggtggtggtctcccgctccctgggaggtcaccatattgacaccaaacttactgtagtcacccaattggcatagtgcactacagcccagaactcccggattcaagtgattcttccacctcagtctcctgagtagctgggactacaggcattcatccctgaacccagcttttcagcatttttgatgaatacttaagaccacatcaccttccatacaggggaccttacttggctcccagcagtgatgggtgagtgtgtccatttctctgaatgtctgacatttgcaaatgaatgttagagatatttgctttgcaagatgtagattaaaatcagaagccataaaccaggcatggcgcctcgtgcctataatcccagcactttgggaggcccaggatggaggatcgcttgagtccaggagttcgagaccagcctgggcaacacagcaagatcctgtctctaccaaaaaaaagtttttgtttttgtttttgtttttttgagacagagtctcactctgtcatctaggctggagtgcaatggcacaatcttggtttactgcaacctccgtctcccaggttcaagcgattctctcgcctctgccttatgagtagctgggactacaggcacgcacgaccatgtccgactaatttttgtatttttagtagagacggggtttcaccatgttggccaggctggtcttgaactcccgacctcaggtgatttcgcccacctccttggcctcccaaagtgctgggattgattacacacgtttccaaacagtggatcccacaagaaaagaaggtgtcatcgtaggtgacagaatggaggtccctgtctgagggagggaccgctgagcctcaagtgagtaggctacaaggctggcagggaggtcaccccatcctatggcctaagattgtccccaaacataaagcttgaaccctgaggccccttgattggtttccttggtccttggccagcatttaaactctcctttttttaaatttcttgagacagtttctcactccgtcacccaggctagagtgcagggcacaatctcggctcactgcaacctctgcctgttgggttcaagtgattctcctgtctcagcccccatgagtagctggggctacagacatgcgccaccatgccctgctaatttttgtatttttagtagtaacagggtttcaccatgttgatcaggctggtcttgaactcctgacctcaagtgatccacctgcctcggcctctcaaaggtgctgggattacaagggtgagccaccgtgcccagcctacactctcttgacaaaggtttttataaatcccaatttggctgggtgccgtggctcatgcttgtaatcccagtactttgggaggctggggccaggggatcacttgagcccaggagattgagaccagtctggggcaacatggcaaaacccatctctacaaaaaataaaataaaattagccaggcatggtggtgcatgcctgtggtccaagcttcttaggaggctgatgtgggaggatcgcttgagcccaggaattagaggctgcagtgagccatgattgtgccactgtactccagcctgggtgacacagtgagaccctgtctcggaaaataaataaataaaagactgtctgggccaggtgccgaggctcacgcctgtaatcccagcactttgggaggctgaggcgggcagattgcttgagcctggtagtttgagaccagactggccatcatagtgaaatcccatctctactaaaaataaaaaaattagttgggtgtggtggcgcacaccgatagtcccagctacttgggagactaaggtgggagaatcacttgagcctgggatcaaggctgcagtgagccgtgatcaacctctgcactccagcctgtgtgacagagtgaggctctgtttcaaaacaccaccaatgacaagaaaacccatgaccgtccgggcgcggtggctcgtgcctgtaatcccagcactttgtgaggccgaggtggatggatcctgagatcaggggtttgagaccagcctggccaacatggtgaaaccccatcaccactaaagatacaaaaaattagtcgggcgtggtggcacgtacctgaaatcccagctacgtaggaggctgaggtaggagaatcgcttgaacccgggaggtggaggttgcagtgagccgagatcgtgccattgcactctagtctgggcaacagagcaagactccgtctcaaaaaaaaaaaaaaaaagaaaatccatgagcactcagacctgcagccagtgaaggcaaggtagagatgggaccccacccttcagcctgtgtcttacatttttagggggctaatttaatttagaatgtccagcagggaagtgtgtctagctgtccagtgaggggagcctcaagctatcttcccacctcagcctcccaaaccactgggattacaggcatgagtcactgtacctggcctgaaggtcccttttacagataagaaaactgaggttcagggccggcttctgcccctgcccaacctgctggcttcttcctcagccagccctctccaactactgcctatttctttttttctttctttctctttttttgagacggagtctcgctctgtcaacaaggctggagtgcaatggcatgatctcggcttactgcaacctctgcctcccaggttcaagtgattctcctgcctcagcctcctgagtagctgggattacaggcatgcaccaccatgcccgcataatttttttttttttttttttttgagacggagtctcgctctgtctcccaagctggagtgcagtggcgcgatctcggctcactgcaagctccgcctcccgggttcacgccattctcctgcctcagcctcccgagtagctggggctacaggcgcccgccaccacaccgggctaattttgtttttgtatttttagtagagacggggtttcaccgtgttagccaggatggtcttgatctcctgacctcgtgatccgcccgccttggcctcccaaagtgctgggattacaggcgtgagccacagcgcccggctctttttttttttttttttgagacagagtctcactgttgcccaggctggagtgcagttgcgccatctcggctcactgcaacctccgcctcctgagttcaagcgattctcctgccttggcctccctagtaggtgggattacaggcgtgcacaaccatgccctgttaatgtttgtatttttagtagagacgggatttcaccatgttggccaggctggtctcgaactcctgacctcaggtgatccacccgcctcagcctcccaaagtgttggaattacaagtgtgagccatcatggccagccactactgcctatttctgcatctcctgttccagacaaacggaagaaacaaggccatttattgagcgccggtgatatgctgagcgctcaacctgcatcctcaaagatcgtcgatccaacagcctgctaggagtggatcaatcgagtcacagagggggctcgacccccactcactgtagagaggggaaagctgaggttcagaggtgaaacgatactcccggggtcacacggcaaggacatgtaggggcaggttttgggacgaggctattcctgcatccacggtatagaaagaaggcggggcgcaaaggtcagccggtgctagggaccagacagcggcccatagggaggagtggacttgggtccaggatgcgcctgatggggcggggctatctttattgggtgggcagtgcaggaccaggctgccccatcaggtggaagcggggcgaagtgcacctgtgcagagggtttgggggcgtggctagaggctgagatgcgccgggtgggctggggctggggctggggctgggcggagcgggcggctcagcactgcagcggaagagctttcttgctacacgcagttgaggctaagctaccagcaggatgaaaggatcctgctgtgggtgatcgtgcacaaataaggctgcgaggtcacgtcgtccatgcactgagagaaacgagaggacccccggcctcagctcctagtccagcaaatggaggcaccatccttgactcctgtctgtgcctgtctgcgcctcagcaagcctcagtctccatatctgtcgaatgggcatgccatccccgagatggaagggaccttttgtgcaccagagctggtcccttccttgtgcccccacagcctcagaataaagccaaacacctcacctgtccaccctcaactccctccaccatcccccttattcactgtactccagccacaggcttcccagttggtctttgcacagggcaacaacattaccgccccagagcctttgcatatgctatctgagccgcctactctcagttcttccctatgactaactgctcctttaggagtcgactaaatgctaccatcctggccaaaatagcctcccctctctgcagtttcaaatccatggagggagtggattttgggctaactggatactactacaaaaaatatacatatatatgcccggtgcagtggctcacgcctgtaatcccagcactttgggaggccgaagcaggcgaatcacctgaggtcaggagttcgagacccatctggccaacatggcaaaaccccatctctactaaaaatacaaataaattagccggctatggtggcacacgcctgtaatcccagctacttgggaggctgaggcaggggaatcgcttgaaccggcgaggcggaggttgcaatgagccaagatcgcgccactgcactctctgggggatagagcgagactctgtctccaaaaaaataaaataataattccaaatggacctgagatgtgaatatgcaccctgcgaacactagaagaggctatgtgcagccaggtgtagtggcgcatgcctgtaatcctagcattttgggagactgaggcaggtggatcacctgaggtcaggagttcgagaccagcctggccaacatggtgaaacactgtctctactaaaaatacaaaaacttagccggtcatgatggcaggtgcctgtaatcccagctactccagaggctgacccagaagaattgcttgaacccgggaggcagaggttgcagtgagccgaggtcgtgccactgtaccccagcctgggcaacaagagcaaaactccgtctcaaaaaagaataataataataagagggtatgtgtgcatttctgtaaggtctgggaagggaaagagctttcataatgatcaatcagagcccaggagcaacaatgggaaggacgtgtgtattcatacatgtatgtgtgtgtgtaagagtaaaataggccgggtgcggtggctcatgcctgtaatcccagcactttgggaggccgaggcaggcagatcacttgaggtcaggagttcgagaccagcctggccaacatggtaaaccctgtgtctactaaaaatacaaaaattagccaggcatgatggtgcgtgcctgtaatcccaggcactcaggaggctgaggcatgagaatcacttgaacccaggaggcggaggtttcagtgagccgagatcacgccattgcactccagcctgggggtcacagcgagactctgtctaaaatacaaaaaacaaaaaaagagtaaaataaaacctttggccaggcacagtggctcatgcctgaaatcccaaagcctttgaaggctgaggcaagaggatcacttgaggccaggagttcgagatgaacctgggcaatatagcaagactctgtctctacaaaaaataaaaaattaactaggcacattggtacgtgcctgtagtcccagctatgcgtgaagctgaggtaggaggatcacttgagcccaggagtttgaggttacagtgagctgtgattgtgccactgcaactgcactccagcctgggagacagagtgagaacctgtctcaaaataataataataggccaggcctggtggctcacgactgtaatcccagaactttgggaggttgaggtgggcggatcatgaggtcaggagttcaacaccagcctggcaaacatggtgaaacccagtctctactgaaaatacaaaaattagccaggcgtggtggcgggtgcctgtaaccccatctactggggaggctgaggcaggagaatcgtttgaacccgggaggcagaggttgcagtgagatgacatcacgccattgcacttcagcctgggcgataagagcgagactccgtctcaaaaaacaaaaaacaacaccaaaacaacaaacaacaacaacaacaacaacaaaataataataataataataatgcattgaacaatgatcatgagttttaaaaaatgaaaaaaaccaaaacaaaacaatgagctggggccaggtgctgtggctcatacctataatcccagcactttgggaggttgtggtcgtgatacaggagatagaaattattttggcagacagtgagggtaaaagagtcctgggaatttctcttttaacaaaaagcagccccccaaatcatttctttctttttttaatttttattttttgagacggagtttcgttcttgtcacccaggctgtagtgcagtggcacgatcttggctcactgcaacctctgcctccctggttcaagcaattctgtctcagcctcccgagtagctgggattacaggcgtgtgccaccatgcccggctaatttttgtatttttagtagagacggggtttcaccatgttggccaggctggtctcaaactactgacttcaggcgatccacccacctcggcctcccaaagtgctgggattacaggcgtgagacactgtgcccggccttcttttacgagatggagtctcactctgtcgcccaggctggagtggagtggtgcaatctcggctcactgatacctctgcctcccaggttcacgctactctcctgcctcagcctcccaagtagctaggattacaggcatgtgccaccatgcccagctaattttggtatttttagtagagatggggtttcactatgttggccaggctggtcttcaactcctgaccttgtgattcacccacctcggcctcccaaagttttgggattacaggcgtgagccaccgtgcccagccgcaactcatttcttttttcttttctttttttcttttttttttgagacagagtttagctctttttgcccaggctggattgcaacggcgcgagcttggctcaccgcaacctccgcctcccggcttcaagcgattctcctgcctcagcctcccgagcagctgggattacaggtgcctgccaccacacccggctaattttttgtatttttagcagagacagagtttcaccatgttggccaggatggtctcgatctcttgacctcgtgatctgcccaccttggcctcccaaagtgctgggattacaggagtgagccacagcgcccggccaactcatttcttttctaacaaaaaacagcctgaaaaatcgagctgcagacatggataagcaagtgggaagcttccaggggtgaataccagcagctgtgtcaatggaaaagggccacctgagggcctggcatgttcaacatgggggctccagcttcccttttttttggtcactacgtgtacagtaaagaaacaggttttagtttggctgggcacggtggctcatgcctgaaatcccagcactttgggaggctgaggcaggtggatcacctgaggtcaggagttcgagaccagcctggccaacatggcgaaaccccgtctctactaaaaatacaaaaattagccaggcatggtggtgggcgcctataatctcagctactcaggaagctgaggcaggagaatcgcgggaacccaggaggtagaggttgcagtaagccaagatcgagccactgcactccaacctgggcgacaaaaaaaaatgaacaggcaacatggcgccagccagctagagaactcatctgcataataaaagattaagaagccaggcgcagtggttcatgcctgtaatcacagcactttgggaggatgaggcagcagatcatgaggtcagagtttgagaccagcctggccaagagaccagcctggccaacatagtgaaaccccatctctactaaaaaaattagccgggcatggttgcaggcacctgtaatcccagctactcaggaggttgaggcaggagaattgcttgaaccagggaggcagaggttgcagtgagctgagatcgcaccattgcactccacctgggagactcaaaaaaaaaaaaaaaaaaagaaagaaaagaaagaaaaaaaagattaggatgggaaggccagcttttcacaccctatgcaaattacacacatagccttaaccaggtttttacaccctatgcaaatgaaacacctggtccaaccaatcttttgtgccctatggaaatcagacaccacctccttaagctcatccataaaactcactgctttttactgaggaagtggaaacccgttcaagatccctctctctgcagcagagagagcgcttctctttctttcaccgattaaacttccactctgaacctcactctttgtatgtctgagtcctagttttccgggcctgtgagacaacaaatcttgggtatttaccccagacaacaacactactccagtgggagggaacacttgaagccaggagtttgaggccggcctgggcaacttattgagacaccatttctataaaacaaacaaacaataagcaggggctaggcatggtggctcacgcctgtaatcccagcactttgggaggctgtggcgggcagatcacctgaggtcaggagttcgagatcagcctggccaatatggtgaaaccctgtctctactaaaaacacaaaaattagccaggcatggtgtcaggtgcctgtagtcccagctacttgggaggctgaggcaggagaatcacttgaacccaggaggtggaggttgcagtaaactgagatcgcaccactgcactccagcctgggtgacagggcgagactccaactcaaaaaaaaaaaaaaaaaaaaaaagctgggcacggtggctcatgtctgtaatcccagcactttgagaggctgaggtgggtggatcacctgaggtcaggagtttgagaccagcctggccaacatggtgaaactccgtttctactaaaaatacaaaaattagccgggagtggtggcacacgcctgtaatcccagctactagggagggtgagacaggagaatcacttgaaaggagaatcacttgaacctgggaggcaaaggttgcagtgagccaagattgttccactgcactccagtcagcctgggtgacagagagagactctgtctcaaaaaacaaacaaacaaaacagtcagcaggaacaggctccagggagagacgttctgctgcctgggttgggagggctatgagaagttggcagaaggaggagcctagggaggttcctagatttttctgagtgcttgaggactctctctctgatttggggaggcttagggagcactgggcagctctgagagtggcctgggagcctggctgtgccccctgcaatcctgatgctttggggtaagcaggtgtttgccccaccaggccggagggcagagcagttcctctggaacatctcccaatgcacaaaggttctggatatgggtatgactgtgaacttcccctcggcaaatacctccccgacggaaatgcacacgcagccttctctcttggaataaggcaggaaaataaaaaaataaaaataaaaaataaatgtataagaaggtgaagtcacaacgggcagtagacagttggggatattgcaccatccctgcaggaaggaagcaccttggagctgacccaggccgcctcactctgcttccttttgaaacgctcgtgacttttcaaatactgcattttgctgacagggcaaagcatgctcagctggccatgacgacaggctctctggagacttggagaatgttccaggttgactcagaggaatgcaggttggaatccctgcttcatctctggttacctctgtgagcttgggcaaggatgggctttttatttttatttttattttattttatttattattattattttttaagacagagtcttgctctgtcaccaggcaggagtgcagtggcaggatctcgggtcttcgcaccctccacctcctgagttcaagtgattctccagcctcagcctcctgggtagctgggattaaaggcacctaccactacacctggctaatttttgtatttttagtagagatggggtttcaccgtgttgatcaggctggtctcgaactcctgaccttgtgatccgcctgccgtggcctcccaaagtgtgagccactgtgcccagtcccaggctttttaataaactcttctggagtaactgggtatctgtgtggcacaaaataaaccttgatccctacctcacaccctacacacaaaaattcacctttggggaaagccctttctcactctgagtctcttctgggccatggtttccaactcatagagctgctgtggtactgggtcccagcagccctgcctgaacacttcgcaaaaagtaactatcattggaggtgtgggggttcatgcctagaattccagtgctatgggaggatgaggcaggaggatcacttgaggccaggagttctagaccagcctgggcaacatatgcagacctcatctgtcatatatatatatatatatatattttttttttttttttttttgagacagagttttgttcgttcccccaggctggagtgcagtggtgcaatctcagctcactgcaacctctgcctcccaggttcaagcaattctcctgcctcagcctcccaagtagctggtgtgtaccaccatgcttgactatttttttgtatttttggtagagacggggttttaccatgttggccaggctagtctctaactcctgacctcaagtgatccacccaccttggcctcccaaagtgctggggttacaggtgtgaaccacagcgcctggcccccacctcttcatattgtcacatgggtcttaggcttccacatatgaattccaggaggacacatacatttgggccataggagagacaacacatcagactctcaggaaggactgaaggggtgggagtgggattctgtattcgatgggactctgcaaatttgaattgttcacatagtatacagtgattcccttttatcggaggtttcactttctttctttctttctttttttttttgagatggaggcttgctctgtctcccaggctggagtgcagtgctacgatctcggctcactgcaacctccacctcccaggttcaagtgattctcctgcctcagcctctggagtagctgggattacaggcacgcaccaccacacccagctaatttttgtatttttagtacagatgcagtctcgccatactggtcaggctggtcttgaactcatgacctcaggtgatccacctgcctgggcctcccaaagtgctgggattacaggcgtgagccaccgcacccggcctgaggtttcattttctgtggtgttggctaccttccatcaacctcaatccaaacatattaagtggaaaattccagaaataattcgtaagttttcagttgcctgccgttatgagtagtgtgatgaaatcagtccccaccccgccccctcccaccctggatatgaatcatccctttgttaagggtgcccacgccatagacactaccagccggctagtcacttagtaatcttctgggtgatcagatcaaccgtgtcagtattacagtgcttatgttccagaaatccaaattttattaattttctattttattatgttattgttgttaatcttttactgtgtctcactgataaattaaactttatcataggtatgtatgtatgcataggaaaaaaacagtgcatacacgtttggtattttctgaagtttcaggaatttactggcaatcttggaacatattccccacaggcaagggggaactattgtattattttggtattcaaaataaaagaggctgggcatggtggctcatgcctgtaatcccagcacttcgggaggccaaggcaggagcaatcgatcccttgagcccaggagttcgagaccagcctgggtaacatagtgacagcccgcctttacaaaaactttgaaaagtagccgggtgtggtagctcgtgcctgtagtatcagctactctggaggctgaggtagaattgtcttgggcccaggaggctgcagtgagttatgatcacgccactgcactccagcctgggggacagcatgagagcctgtctcaaaaaattaaaacaaaatagcacacagaaaaaagtttttgaaattagcctcaataacttgacagtttcatccatgtcagggatcaagcctgaactctggatgaatcacatatctatttttttttctttttttgggggagacagagtgagactgtctcccaggctggagtgcagtggcacgatctcggcttgctgcaacttgtctcttggcttcacgcaattctcatgcctcagcctcccaagtagctgggattacaggcatgcgccaccacgcctggctaatttttgtatttttagtagaaacggggtttcaccatgtcagccaaggctggtcttgagctcctgacctcagatgatctgcctgccttagcctcccaaagtgctgggattacaggcgtgagccaccgccccggccttgaactttaatttgtctcctgttctgacctgcctcaggtggagctctgctgggtgggtggggctgatagcctttcccgtcctacatgagttgtagatatgtgtgtgtgtgtgtatatatatgtgtgtgtttatgtgagtgtgtatgtgtgtgagagagatgaattctttttttctttttacttttttctgttttttttttctaggcggagttttgctctgttgcccagtctcaagtgcaatggagcgatcttggatcattgcaacctctgcctcccggattcaagtgattctcccacctcagcctcctgagtagctgggattacaggtgcctgccaccatgcctggttaatttttgtatttttagtagagatggggtttcaccatattggccaggctggtctcgaactgctgacctcaggtgacccgccctcctcggcttcccaaagtgctgggattacaggtgtgagccactgtgcctggccaagagatgtatgttgtatttttttttaagcagaggaaagaagtataaacattaaatttaaaaacaaaacttttggccaagcatggtggctcagtcctgtaatcccagcactttgggaggctgaggcaggtgggttacctgaagtcaggagttcaagaccagcctgccaacgtggagaaaccctgtctttactaaaaatacaaaaattagctgggcatgatggcgcatgcctgtaattctaggcacatgggaagctgaggcgggagaatcacttgaacccgggaagtggaggttgcagcgagccaaggttgcgccactgcactccagcctgggtgacaaaaggagactcttgtctccaaaaaaaaaattttttttaaattgtttattttttagagacaggggtcttactatgttgtccatgctgttaaactctcgggctcaagcgatactctccccttagcctcccgagtacctgagattacggggcgtttgccaccacaccgggctaattttttatacttttaatagagacaggatttcaccatgttggccagagtggtcttgaactcctgacctcaagtgatccacctgcctcggcctcctaaagtgctggaattacaggtgtgagccaccatgcctggccgtttattattatttattattatttttttgagacgtagtttcactcttgtcacccaggctggagtgcaatggcgcgatcttggctcactacaacctttgcctcacaagttcaagcaattctccttcctcagcctcccatgtacctaggattacaggcacacgccaccacgcctggctaattttttttcacgccatgttgacggggtttcaccatgttggccaggctggtttcaaactcctgacctcgagtgatctgcctgtgttggcctcccaaagtgctgggattacaggcgtgagccacggtgcccggccgagaggtataatttctgtttattttttctctctgcttatcttgttggctgtttcttctccaatacagtcacatttcttggataagaacaaaaatataataagaccgttttgaaaatgcaggcaaagaaatgctggaaagcggtcatgaacatgccaacggagattatctctgcgagctgagcgattaagggaggggttgcagggtttttatttgttttcttttctgcttctttgtttctccatcaggaaattgaccaacatttttttaattaggggaaatgacagttaccccgtgtgcactttttggcaggacctggccttcagcgtgggtcttggggccccctggccagtctgagctcctgtggggcagtttttctggtcatctgcagaggccccgggtgcaggcaggggagccccagctcctacgcgctgcatttcctcagaggctccagcaccacgaatttttttttttttttttttttttagacaggaaatttctctgtcacccaggctggagtgcaatgacacaatcatagctcactacagcctcgactcccagggctcaagtgatcctcagctacctcagcctcctgagtagctggggccacaagcatgtaccaacacccatggctaaattttgtattttgtgtagagacaggggtctcaccatgttgcccaggctggtcttggactcctgggctcaagtgatccgcccactttggcctcccaaattgctggggttacaggtgttagccaccacacccaaccgagggcttcattctctctgacgctctgtgaatagagtttagactgtcctcccaccagcactggggtgaggtaatgcaggaaagggctggtcccactggcccagaagcagataagagcaccctccatctacagccaaaagttaaaatccaaaatccagaaccttcctgagccaccctttctgtctttggtgctggcacggcactggcatgcagtgggtgccatattattgctctccagcggcatggcaggtcttaccactgtggcatcaggaccccgggtttctctagctcgggtgatgtggatcacttgagaggccgaggatcgcttgagcccagaaggctgagcctgcagtgagccctgatggcaccattacactctagcctgggcaacaaattgagaatctgtcgcaaaataaaagaaaaaaagagagagagagagagagagtttctcttatttgcagtcttgagtaaggcgtcctgcaggaatttttgtttgtttgtttctgttttgagatggagtttcgctcttgttgcccaggctggagtgcaatggcgtgatctcggctcaccgcaacctctgcctcccaggttcaagtgattctcctgcctcagcctccctagtagctgggattacaggcatgtgctaccatgctcggctaattttgtatttttagtagagatggggtttctctgtgttggtcaggttggtctcgaactcctgacctcaggtgatccgcccgcctcagcctcccaaagtgctgggattacaggcatgagccaccacacccggccatttattttattttattttattttatttttttgagatggagtttcactcctgctgcccaggctggagtgcaatggcgtgatctcggctcactacaacctctgcctcccgggttcaagcgattctcctgcctcagcctcctcactagctgggattacaggcgcctgccaccatgccaggctaattttttttttttttttgagatggagtcttgctctgttgcccaggctgtagtgcagtggcacgatctcagctcactgcaagctccacctcccaggttcaggccattctcctgcctcagcctcccaagtagctgggactacaggcgcccaccagcgcctgtatttttagtagagacggggtttcaccgtgttagccaggattgtctcgatctcctgacctcgtgatctgcctgccttggcctcccaaagtgctgggattacaggtgtgagccaccatgtccggcctaatttttgtatttttagtagagatggggttttaccatgttggccaggctggttttgaactcctgacctcaggtgatccacttgtcttggcctcccagcctgctgggattacaggcgtgagccactgcgcccagccaatttttgtatttttagtagagatgggggtttcaccatgttggccaggttggtctcaaactcctgaccacaagtgatccgcccacttcagccttctaaagtgcttggattataggtgtgagccaccacacctgacctggagaatatatctttttcttttttttttttttttagatagagtcttgctctgtcacccaggctggagtgctatggcacaatcttggctcactgcaacctctgactccctggttcaagtgattctcctgcctcagcctcccgagtacctgggattacaggcatgtgccaccacagcacagctaatttttgtatttttagtagagacagggtttcaccatgttggccaggatggtctcgatctgctcacctcgtgatccgcccacctcggcctcccaaagtgctgggattacaggcgtgagccaccgcgcctggccgaatatttctcataccaggaaaagttggaagcagcccacagatctagcctgagaggcctggttaaattagtgtctggccgggtgtggtagctcatgcctgtaatcccagcactttgggaggccaaggtgggaggattgcttgagcctaggagtttgagaccagcctgggtgacatagggagcccccatctctacaaagaataaaaattcaaaaattagccaggcatgtggcatgaacccatgttcatgcctatggtcacagctacttggaaagctgaggtaggaggattggttgggcccaggaggttgaggttgcaatgagccatgattgcaccactgcactccagcctgggtgacagagcaaagccttgtctgaaaaaaaaaaaaaaaaaaaaaaaaagatttgtgtctgcatgacacaccatgatgtggacagggaagggatggaaaggacaccatgcatgcagataggagaccacatacactgcagcaactccacttctgtgaatgtatccgacagaaatgggaccttcattccgctgggtgcggtggctcacacctgtaatcccagcattttgggaggccgaggcgggcagatcacttgaggtcaggagtttgagaatagcctggccaacatggcgaaaccccatctctactaaaaatacaaaaaattatccgggcgtggtggcacatgcctgtaatcccagatactcgggaggctgaggcaggagaactgcttgaacttcggaggtggaggttgcaatgagccaagattgcgccactgcactccagcctgggcaacagaggaagactccgtcaaaaaaaaaaaatgccctgttgcagtggctcacacttgtaattccagcactttgggaggtcaaggcaggcagatcacctgaggtcgggagttcgagaccagcctgaccaatgtgaagaaaccccatctctactaaaaatacaaaaattagccaggcgtggtggtgcatgcctgtagtccgagctacttgggaggctgaggcaggagaatcgcttgaacccgggaggtggaggttgtggtgagccgagatcgtgccactgcactccagcctggtgacacagcaagactccatctcaagaaaaaaaaaaaaaaaaaaaaaagaacattctcaagaggaaataaattatccgtgacagggctcaatggttctccttcattcatgtgaggtttttaatgctttttcatatgccttgggggagagttgtcaaatcttaacaaatcagagaagaattataactcgtagaagaatgtcaaaggcatttggagggtggaagctgcagaaattgagccccatctgcaaatgggatggacagatgaaagatgtacattctcaagtctgcgtaggaacgtatattaagccgagcatggtggctcacgcatgtaatcccagcactttgggaggccaaggcgggtggatcacctgaggtcagaagtttgagaccagcctggccaaaatggcgaaacccgtctctactaaatacacaaaaatcagccgggcatggtggcacgtgcctgtggtcccagctactcagaacgttgaggcaggagaatcgcttgaacctgggaggcagtggttgcagtgagccgagatcgcgcccttgcactccagtctgggtgacagagtgagactccgtctaaaaaaaaaaaaaaaaaattgatccattccatcttgcatttttttaataaagtttttttttaattaaaaaacattttttttttggtggagattggtgtcttactatgttgcccaggctgatcttgaactcctggactcaagtaatcctcccacctcagcctcccaaagtgctgggattacaggctgagccactgcacccggccttgcagatgtggttaacacctccaatcaactgacctgaagtaaaggaatttatcctccatgaccttgatgtttcttttttttttttttgaaaccaagtttcgctctttttgcccaggctggagtgcaatggcgtgatctcggctaactgcaacctccacctcccgggttcaagacattctcctgcctcagcctcctgagtagctgggattacaggcatgcaccaccatgcctggataatttttgcatttttagtagagacggggtttctccacgttggtcaggctggtctgaaactcctgacctcaggtgatcctcctgcctcggcctcccaaagtgttggggttacaggcgtgagccactgcacccagccgatgcttcttatctaatcagttgaagtccttcagagagcaaaaacagcttctagagggaaaaaggaattcgtaagcttgcaacaaataaagcctccctgtttccaacctgctagagtgccctatgaattttgggtttatcagcccccacgattgcatgacccaattccttaaaatacatcttttttttttttgagagagataggatctctgccacccaggctgaagtgcggtggtgggatcatggctcactgcagcctcgacctcctgggctcaaacgatccacccacctcagcctctggagtggctgggatcacaggcacacaccaccatgcccaaactttttaaaaacttttttgtaaacatgggatcttaaactcctgggctcaagcaatctttccatgtcagcctcccaaagtgctaggattccaggcgtaaaccaccacgcccagacaaaataaatcttaaaaaattttttttttttttagagaaaatctctttctatatatgtaatatgtatatttcctgttggttctgtttctcttgtgagccattactgatacaggcacccagaggcccggtgatgggaaggaggcggggttactttccaatacatactcagggaatttcttttttttctttttttgagatggagtttcgctctgtcgcccaagctggagtgcagtgtatggtcttggctcactgcaagctctgtctcctgggctcaagcgattctcctgcctcagcctctggagtagctgggattacaggtgcccgccaccatgcctggctaattttcgtatttttagtggagacagggttttaccatattggcgaagctggtcttgaactcctggtctcaagtgatctgcctgcctcagcctcccaaagtgctgggattacaggcgtgagttaccgcgcccggccactcagggaatttctgagatagtgacagcttccggtggcaggacctcagctgattgccttggcctttgtccgctgaacccaggccagcttcctagcctcgggcgccacccaagacacctgcagaccaaggacacacattagaggccttgggtttcacggtcctgggcagggccaggcctgaggtgctgaccaagcctgctaccctcaaccaaaataaacctagggcaggatgctgcttgatcagccatccatagaacaccacagcccgagccgggtcacagatctgctttggctggcctgcggacagggaggtcctcagccgcaaaaggcctgagaggtggacacattggatttgaagaccaaaaatggcccccttctggttgggtgcagtggctcacacctgtaatcccagcactttgggaggctgaagtgggcggatcacttgaggttgggaatttgagaccagcctggccaacatggtgaaacctcgttctctactaaaaatacaaaaattagccgggcttggtggcatgtgccttgtagtcccagttactcggaaggctgaggcagaagagtcacttgaggctgcagttgcagtgagccgagatcgcaccactgcacttcagtctgggtgacagagcaagactttgtctcaaaaaaaaaaaaaaaaaaggcccccttcggagatgtgggagttgggggtgggggcagatttcaaagcctgggggattcgatctgtcatctgtgcaacccagctgactatgtggctaaagtttaacaagtttcacaataaccattagacattgactgacactgccagggaagtgctccagagatggggaaacccacgtccacacaaacacctgtccacgcgtgtccacagcagctctagtcatggttggcagaaagtggaaacctccccatgcccatcagctggtgcatggataacagagtgtgttccatccacacagggggatatgatacagccatggaaaagaaggaagcactgatccatgctacagcgtgaatgaacccccaaaacacgatgctgagtgagagaagccagacacaaaaggccacacagtgtgagattccattgatctgaaatgcccagaacaggcaaatccatagacaggaagcagattggtggttgccagggactggtggaggggaatggggagtgactgctgatggagacaggtttctttttgaggtgataacaatgagcctgggtggctgggagtggtggctcacgcctgtaatccctgcactttgggaggctgaaggggacagatcacttgaagtcaggagttcaagaccagcctaggcaacatggcgaaaccccatctctgctaaaaatgcaaaaattatctgggcttggtggcatgcgcgcatagtcccagctactcgggaggctgaggcaggaggatcacttgaacccgggaggtggaggttgcagtgagccgagatggcaccactgcactccagcctgggcaaaagagtaagaccctgtctcaaaaacaaacaaacaaacaatttattatcattattataatttaagatggcatctcaagcgacagaatgggccttcgtctcaaaaaaaaaagagcctgagcaacataacaagaccccgtctctgcaaaaatataaataaaattagccaggcgtgctggatacacctgcggtcctagctattcaggaggctgaggtgggatcgtttgagcccaggaggtcgaggctgcaatgaactatcattgcaccaatgcattccagcctgagcgatagagtgagatcccacctaaaccgcatttattgagtatccactgtgtgccaggcactgagctgggtgctagaacagagcccagagtgggagaaacagctataaacagacgatcatagtgccaggggaatgcttcttttttttctttttctttttttttttttctgttttttttgagatggagtcttgctctgtcacccaggctggagtgcagtggcatgacctcggctccccgcaacctccacctctcaagttcaagtgattctcctgcctcagcatcctgagtagctgggatgacaggcgcgcgccaccacgcctggcaaatttttttttttttttttttttgagacggagtctcactgtatcgcccaggccggagtgcagtggtgtgatcttggctcactgcaagctctgcctcccaggttcatgccattctcctgcctcaacctcctgcgtagctgggactacaggcacctgccaccatgcccggctaattttttgtatttttagtagagatggggtttcaccatgttagccaggatggtcttgatctcctgacctcgtgatctgcccacctcggcctcccaaagtgctgggattacagaagtgagacaccgcgcctggccatttctgtatttttagtagagacagggtttcaccatgttggtcaggctggtctcaaactcctgacctcgtgatccgcccaccttggcctcccaaagtgctggtattacaggcgtgagccaccgtgcccagcctggatgtttctcttatagcacagagaggggagagatgtagcattttatgaacctttgaagaatggaggagggggtgtgggtgttgggttttgggggatgaatatgagtttgccaagttgaaggtgggggctgaccatgaactgaactttatggaatctaaccaacacaacaaaataaatctaattttcaaaatgaaaatgaaaatgagcatattctcctttgttggcgtgaactgcaggaatgtttatatgtggacacttcacaggccagcctgcaccaggcctggctcatgccggccagttccttcctgaagctattcatgtctgctgcaaagatgggattaaaaacagcatgttggcctcttcattcattaggagagtggagaaatgggaaaatttgggctgcccaaactcctcatgatctatgaggataaacagaaagttcaacgccagccctgactgaggaccccccacaaggacttatcttctatgtttttcttttctttttttgagatggagtctaggtctgttgctcagactggagtgcagtggcatgatctcagctcactgcaacctccacctcctgggttcaagtgattctcctgcctcagcctcctgagtagctgggattacaggcttgtgccaccactcctggataatttttgtattttagagatagggtttcgccacgttggccaggctggtctcgaactcctgacctcaagcaatccgcccgcctcggcctctcaaagtgctaggattacgggcgtgacccaccacgcccagcctccttgctctctgaatctggatctcactttctgtaaatccaatgtgacctttggctgtttactgagtacaagacgctcctgatgacccattttacagatgaggaaattggggctcagagaaggcgagagagcagagactgggattcagtgaggagggtcccagggggcctgatgatgatgatgattattattattatggagacttgctctttttgcccaggctagagcgcaggggcgtgatgtcggctcactgcaacctctgcctccagggttcaagtgattctcctgcttcagcctcctgagtagctgggattacaggtgtgtgccagcatgcccagttaatttttgggtaaagacagtgtttcaccatgttggccaggctggtcttaaactcctgacctcaaatgatccacctgcctcggcctcccaaagtgctgggattacaggcatgagccacccgcacccagccaggcctgaatttttttaaagacagggtcttcctatgttgtccaggctgaagtgcagtggcacaatcatggctcgctgcagctttgagctcctgggctttagtgatcctctcacctcagcttctcaagtagctggaactacaaggaatgggctaccacacctggctagatttttaaattttttatagagactgggtctccctatgttgcccaggctgttctccaactcctgggctgaagtgatcctcccactttggcctcccaaaatgctgggattacaggtgtgagccactgcacctgattgatggtgagtttgaagtggaaggtgtttgaaggggtgaaagtgtccatcagaaagcagctggccaggcgtggtggctcatgcctgtaatctcaatcccagcactttgagaggctgaggtgggcggatcacctgaggtcgggagttcaagaccagactgatcaacatggagaaaccccatctctactaaaaacacaaaattagctgggcatggtggcgcatgtctgtaatcccagctactcaggaggctgaggcaggagaatcgcttgaacccgggatgcggaggttgtggtgagccgagatcacgccatggcactccagcctgggcaacaagagcaaaactctgtctcaaaagaaaagaaagcagctgagaccaatatagctaaggagtgaagagctgggttccgattctgattctgcccacttgcaggggctcttcctagtccttctgtgaacagcatcttgttgtgcttggggtctttcccccttcttagccaatgaagccctagctatcagtgtattgtagccctctggccactgtgattggttcagagacaggcatatgccccgggctggggcaataatagacaatcttggtgtctgtgccacccctatcagacaacagagctcttgtgatgttgcttaaatgggtaaggctaggctccgagttgctggccaccatcttgcctgcctgtaaacaaaggacagcaaagccaagaaatagagagagaggctggtggttttggttgagtgccttgatccagctgatcctgaaggtgtcctttccaattccatccaccaattaattccctttttggctttatgcagcccaaagagttcccatgtattcagcccttagtgctgcagagacagcactataaacatgtcagttacttcattcattaggagagcagagaaattggaaaattgaggctgccctcattgctgtctatgaggataaacagaaagtcaaagaccaggcaggctgtagtggctcctgcctgtaatcttagcactttaggaggctgaaataagcggatcactcaagcccaacagtttgtgaccagcctgggcaacatagtggaccctgtctctacaaaaagaaaaaaaaaaaaaaaattagccaggcatggtggtgcatgcctgtagtcccagctacttgggaggctgaaatgggaggatcacctgagctcagggaggttgaggctgcagtgccaccgcactccagcctgggtgacagaatgagactctgtctcaaaaaaaaaaaaacaaaaaaaaaaaacagctaaagaccagccctaagaactgaactttctggaaatggcttggacgtcccacctgcctgccccagagagttgttaaccaacgtctctgggcctcagtttcctcgtctgtaaagggagctgtggttgcctaaggtgaaaggagcacaggtgccaagcgttctttgccatgcctggcgctataagatatccagtgctatctagggatgccccccgggtgcccaccctggactcctgcttacttggacttggataaaagaaggttttctggccaggtgcagtggttcatgcctgtaatcccaacactttgggaggcagaggcggatggatcatctgaggtcaggagttcaagaccagcctgagcaacatggtgaaaccccatctctactaaaaatacaaaaattagccaggtatggtggtgcctgcctgtagtcctagctacttgggaggctgaggcaaaataattgcttgaaactgggaggtgggggttacagggggttgcagtgagcccagattgagctgctgtactccaccagcctgggcaacagagtgagactctgtctcaaaaaaaaaaaaaaaaaaaaaaaaaaaaaaaaaagaagaagaagaagaagaaggttttctgcgttctgagggacttagttgctcccagacatctctgcctcttgcaacaacctgccaagaacgtggagagccagaaaggagagggtgaacatctctggactgaaacagggaaactgtcaaaggctctagagtaggcaggtgggacgtccaagccagaaaggacaggtttgctctgggttccttgcaagtgacctccatggggttcggggctgagacggagcctacaacgttgtctaaggccacatttcagacaactgccagagaatggttgttttaccaaatagctggccagcacacggggtctatgtctctgtgtcttttggctaggttattcacaccccaccctcgtcagctgtcagggttaccctggggaatgtcaattccaggcacttctggttccagtgggcattcaggcaaagggtgctccagcagcccagggtagccctgataccctgcacaggtgcctgccattaaatggggctggaaccgaggggtatagatggaacagttcagaattgctttcattcctgccctgcccttccagactgctcttttaaaaggtgtaaatcaggccaggcatggtgatacatgcctgtagtcccagctactcaggaggctaaggctggaggatcatttcagcccaggaggtcaaggctgcagagagctatgatcatgccactgtactccagcctgggctacagagtgagatgccgtcttaaaaataataatgataatgatgataaattttttgtttgtttttgagacagagtcttactctgtcactcaggctggagtgcagtgacgccatcccggctcgctgcaacctccactttccgggttcaagtgatcttctcgcctcagcctcccgagtagctggaactatgtgtgtgtaccaccatgcctggctaatttttgtatttttagtacaaacggaattttgccgtcttgcccaggctggtctcaaactcctgacctcaagcgatccgtctgccttggcctcccaaagtgctgggattacaagcatgagccaccgcaccatgacaaaagcccctctctactaaaaaatacaaaaattagctgggcatggtggcgcgtgcccatagtcccggctactcaggaggctgaggtgggaggattgcgtgaatcttggaggtggaggttgcagtaagccgagatggcaccactacactccagcctgggcgacagagtaagaccctgtctcaaaacgaaaaccaacaaataaaaatgtgtggtgaatgaatgaatgaatgaatgagtgaacagacaagatgtaaaaagccgatcagagcctctgccaaggagatgtcagagggtttttcacagcagcctttgaacaatggccctgggaggaagccaggcttatttccccatttgacacaggaagaaactgtcttggttcaaatctgatccttttttctcctaagaccacagctgcctccgaaacaaaggccgacaattgctgccagcaagtgctttgctgtttttacttcctctaaacattcttcagtggattttcctttcaaactggttgtaaggaggcacatggctgggtgttggtggggggtggcacccctgcccggaccccacacgcttccctaccacgtggccggtttggagtagacccatctttgtgctgaaacacagcccaacattgccatatacggggggcttgtctacattttacaagatttttacaaaaatgatgctacactttgcaaatggatttattttttttgagacaaggtcatactctgtcacccaggctggagtgcagtggtacaatcacagctcactgcagccttgacctcccgggctcaagtgatccttcctcctcagcctcccaagtaggtgggactacaggcatgtgccaccatgcccggctagggtttcttttttttttaatagagatggggtcttgttacgttgcccaggctggccttgaattcctggcctcaagcagtgctctttcctctccctcctaaagtgctgggattgcaggtgtgagccaccacgcccagcttggaacatctttattttaagatgagcatgctggggcctcagggagtgaagtgaattttccaaagtcactcgttgtgaccaggacactggagtcaaggccctttcatcatgtcatggggtctaggtaaggactcaggaaacttcatttatttatttatagatagagttttgcttttgtagcccaggctggagtacagtggtgcgatctcggctcactgcaacccccgcctcctggattcacgcgattctcctgcttcggcctccggaatagctgggattacaggcatgcaccaccacacccagctaatttttgcatttttagtagagacgaggtttcaccatgttggccaggctggtctcgaactcctgacctcaggtgatctgcctgcctcggcctcccaaagtgctgggattacaggcgtgagccaccacgcctggcctttgttttaaggaggaggagtcagccaatgggatgcctcaaggactgggtccactgacacagaacaatggaaacagatcagcgatgtctgagttcacagcatgcgggtgctgctcctaagaacccttctgtagatgctactgttctccccatttgcaaatgaggaagctgacactcagagatgtggatcacccgccccaggttacacagcacagagaggacatgttaggactgaggattcaaattcttaaggtttgctttcctcctggcaaaagcaagtcatgaaggcgtggaagctgaaatctcgaggctaacgctccccttttcacacctggccacaagctgcaagaactgggagttggtgctcccatgagtccaacctgaggattcgctggagaaaaattcagccaagaaaagctcagctcgtgaggtccccctcctgggctgtgaaggaagcggatagtgccagtcattacagagccgcaattcctgagtgttaaagttctcagggccatgagtatggacttcgtgggaaatagaagcaccgtgtagacctatgcatgtgtgtatgtctgtgtgcatacgtgtgcatgtctctgtgtatgtatgtgcatgtgtgcacgcattcgcacatggcgttgcacagggtgtgtccatgtgtacgcaagtgtgtgtatatagggagcttctaaatcagatgaaaccaactggaaatccggatactgatgtttagaattcaagctctggagtcagactgccccaggcctcagtttttccattgggaaatgggctgatcctccccggatgagagcactggagtccagagaggccaatgacgatcagatttatctcagtatatggtctgtgctgtgggccttgaggctgaaattttgtgagctcctttaattctcttttttgtgtgtgttgggggttggcggcagggtcttgctctgtcgtccaggctgggctgcagtggtgcattcatagctcactgcagcctccagctccctggctcaagcaatccttcaacctcagcctcccgaggagctgggactacaggtgggactatcatgccctgctaacaaaaacgtttctttttgtagaggtggagcctccctatgttgcctaggctgcagccccagcattcattaatcatccccggctcctacctctgcccagcccttaatcccccgaacatatgatggggattaatcccccaaacccttgggggggattaatcccccaaacatatggggatggggggacttgtgacaacttaccactctttccctggatagctcctctatggaatgtggtagagtttgggggccacccaaccctcaggctggccagggaggggtgggcaaggggagctgagaagggcttggggatcctcacgagggaaaactgaggcccaagcgggtgggatgtgaaaggatcagtcggtaacaagaccagtccctctgaaccctctaagagaggtcctgggtaaccgtatgtatttaaccctgcaagctgttggctacatttcactggagaaaatgcaggcgtggagggtcccaccgcttgaccacctcggggaggactgactgtgagcagagggtcagtaatagcgtccctgttgctggcacatctctggccctcaaaacaccaccctccaccatgggtgggcattggggtagtatgtggacacaggggagatagaggcctggctgggcccctcagggaacacggtgaccccaaaccaccacaggctcctgcactgttgaggtggggctggtgacagggtgggggtgacagggacagagttgagggacctggaggaggtagagagagtcagcagtcaggtccatatcccaagaggtcagggtttggggggtgaagctggcattggagcccagcctaagggccagtgcctgccagagacacctgcaggaaccacagcccccactgtcccggagaggcagggaaactagggaattgggacatcagcagggtcaccccaaagttagatggcacatgaactgtgtggagggaggcagcaaggtgaggagaccctcaggaggaccctttgttctcatatgctatttcctggactttgtccacaaagaagcccattctaggatgtagggcccaaacccaaatggctaggcgtggagaacctgttagctaaatgacaagccatcatacatacatgtgtatatgtaagtttatttcaggtttgtatttttagatatagggttgcccaggctggagtactgtgatgcaatctcaattcaccacagcctccaatcctgggctcaagtgatcctcccacctcagcctctccagtagctgggattacaagcacaggctgccacacatggcttcagaattttttttttttttttttgagaccaagggtcgctcttgttgcccaggctggagtgcagtggcgcgatctcggctaaacgcaacctctgcctccagggttcaagcgattctcctgcctcagcctcccgagtagctgggatgacaggcatgcgccaccatgcctggctaacttttgtatttttagtatagatgaggtttctccatgttggtcaggctggtcttgaactcccaacctcaggtgatctgcccacctccacctcccaaagtgctgggattacaggcgtgagccaccgcgcccagcctcagaaattttttaagtgaaaaaaagcagggagcagaatagaacttgaagtataatttgcattttaaaggttccatctaaaacacgattgtgcctacgattgtttacatgtggaatatcctctgaagccaacccaatacctgctcttttcccacgggccatggagactgctgagacagcctgtggggagaggaaggcagtctccgagtggcacccttggagtgtcctgtcatttgttttgacttatgggaggagaaagcctctgtgctccattccgcatacatctgggtttggtttttcatcttttacaaggaaaacgtcctcgcgtgctgcttgaacatgcatgcgcgcacatctgtacgtgggcatgcatgcacagcaaaggcctggactgaagccacaccttgcttttgctactggggcttcttggcagcgccttctgcctgtcttgccccaaggaagctccagggaggagaaaggccatgacagggatcttgtggttccacttagtcctaaattattaggttggtggaaaagtaattgaaggttttgccattacttttgcaccaacctagtacaaggcagcaggggagattttaccttccaaatgagatccttcccagtctgtagaggggaaactgaggcctgagatcaagtgacctgcctgggtcaacgccaggacaggcatcctgggctggacaccactcctcctgtcctcctaagacaccctgaccggccttagggtgatattaagaggaactaggggaagaagggttccactactgaagagaaattcctggtggttcctcaccccctgcaggtgagccccacattttccctgcaggctccggcctttctcagggagtgccactgaagctagcggttagacatcgctaagatgaaggcagggtgagggtcttggctggcaatagcttcccccgggacacggtagaagtgaggctgggggtcctgcctcagcttcctaagggctctgtctcaaggctcccgctaagctgcccacagggacctttctacatgagcatcacctgccctgggcacagtgccttccccctccctgcagtctggctcctcccctcctcaccctggtcaggcagaggcccctgcaggccccctgggtgctgccttggtctctgctgtgccctctgcacgcccctcctcacctggagggccaaggggctgttgacagaggaaccatgggcaggctggcagcacccagggacagcagggagtgtgaagatgacagagaggcagctctgcagtcagagggtggcccaggcaggctctggttttactctggcagctggaaccccagccctgggatgatggggcaaagccctgtggggacaggtgagtcgtaggcagcaggggcacagctcccactgccctgacacccctcaaaggcagcttctgtacttggcggtaccgattaccctccccagcctccccagaagggaattgccctccctctggtgggtgcttggtcccttcctgctctctggcatcttccaagctttcctggtgacagtgacacaaggtccctcaggtggggcaagccagtgaggaggggcccgagggaggagcaccacgccggcggagggcacgtcctgggaggcagccatcatctggttctacactgcactcccatctgcgtgcgctggtgtctgatctgattttaaaaacacagccatggagaccccagcacactgcatttcctctacatttattgcaacggctaaatgattaacaacattcacaacttcttagatcttaaaaaacagaaacaaaagaaaacttccattttgtaacatcacaaatgtcttctaggctttatcaaggaccaaaaacactacaattctctaagtgatttccagtgatggaaacaagccagagacagtaaagcacccagagtggcgagagagcacttccagatgcctgttgtcctctcgggggtgaccctggaactagaacgacagaaaagacactgtgactttgacacggctgtgccaccacacatcacgcgcgacacgaggatcctgcagagcggcctctgcagagagcaaggacagcctcggttaagagggaggggctgggggcacggagggccagtggcatctcctctatcccggctggccggcagctggcagcacgcaccatgctctgctggctcccgacaccttcactgccccagcgctgaatccacaggagaggtgtcctctgagagtgtagggggctttctaggttcaaggagatgtgccctttgacccctgccaaggactcacagaaccatctcagctcaaacttggaggagcggcaggaggtggggggcggtcagtggccacacgccacagattcctaaagcatttaactttttaataaaatgaagtggagaaagtcaagaatgaacatgctaggacaaagcacatggaatggtcagggcgatgctggagagagtgcgcttgatccacgctgcaggtgtgtgcgcctcgctcgggtcaatgggctgagccccgcttggagctccatccattcacctgacccatggccaacatggaagctgtcggaggggtcaggaaaggagaaggagaaaggagaagatgaaccccccgcacctgtgactccccaaaaccagctccactccaggcccccacaggctggttcgttcgagggttgggttataaacccaaactccatcctccatgctggcacctctactgccataaagatctgccagttgccaaagctacagaagccactggaagcaagcagagcccctgggggtggtggcactgcaaggtgacagggaccaggcagacaaggagctgggaccacagcctaggaagtctgtggcttaaagaaagccaggatttccttttttttttttgagacagagtctcgctctgttgccaggctggagtgcggtggcacaatctcggctcactgcaacctccgcctcccgggttcaagtgattctcctgcctcagcctcctgagtagctgggactacaagcgcccgccaccacgcccagctaattttttgcatttttagtagagacagggtttcaccatgttggccaggatggtctcgatctcttgacctcgtgatccacctgcctcggcctcccaaagtgctggaattataggcgtgagtcaccgtgccggccttttttttttttttttttggagatggagtcttgctctgtcgcccaggctggagtggagtggcatgatctcagctcactgcaacctctgcctccccggttcaagtgattctcctgcctcagcctcctgagtagctgggattacaggtgcccgctaccacgcctggctaatttttttgtatttttagtagagacggggttacaccatgttggccaggctggtctcaaactcctgacctcaggtgatccatccgcctcaacctcctaaagtgctgggattacaggcttgagccactgtgcctggcccaaagccaggatttctttacagccaatacaagtggcatttcccgctcagttctgtggctgatgccctagccactgctgtgtcccctaatcctggggtgtcagagggatcctaagttttccagatttttgcccatacttaaaacttcaacgatcctgcttcacaaggaaggatgagtggagaattgagtggagttacacgcagcagagtgctggggaatctggagagcgggggcgatcacatgcctggaaatagagcagctgcagagcccaccccaggaggagcctgcctctccttacaaaggctgtaataagacagcacttgacgatgccatacgtgcgaaaagtgcagagtctcagagggtttacaacccccatccctttgtaactgtagtttgcttacactgtggattctaaagagacatgtaaatctggggccgatttcatctgtttaatgattactccccacccgatagagctattctatactgttgctaaaatttcattaagtctctcaagatgcattgatgagatgagacaccatgaataacacattcatcaactcaagtatggcaactgttcagagagcttcagagctttggtacccgagtgcagacttggtaattaccgggaatttgtctcccccgtataaattctggcgaacaacgagaaaacaccatctgtgatcgtttccacatcacgtttgctaacagagcacttctggagagcaatggccagtccaactggaaaatcagccagaggagctggttcctcagcactcacaggctgaggtgcctttcgggggcagcgccaccttctgaaggggaaccaagacagatttggaggggacttgctgctaaaagcatgtgaacagagaggagaggcaaaagcacattgaaaatggtgcatgtttttttctttgagagaaagaaaagccagcgaaacctccgccccagagactgcagagacgtttgttttcatgtacacaccaaaccgtacttgggcactggctccaggccgatccagggcagggatgatgttttaagggcaattgctgcttcaaggcttatctttcacatcagtggttttgatctattcaggaagagaacgattttgttcaaaactgaggtggaaattaggtgagggggcaactaaaaaaaaaaaagaatagaaagatgaggatatttacaggcccaaggccctgcagaaggaaaaggatttgaagaccctcacaaagggacacagccaactgccatcctctgtggcagtggctgtcacagtcgcccttccacttgcatgatggcaaggccctctggactaggaacagtccgtttgctggtcatgttatgtggtaggtggctgtcatctgtgagagaaaacttgagcaagagaagagacaggcgtggcctatttccacacgcacatccacggaggctggcctggaggccttgaggggctcacagccggggcaccaggcaggccatgcgcatctgcccttggccagtgtgaggtttgctccttcagcaaacctggaaggtaagaatggggcatatccacatccatagacccttttgtttccctcacagaattttgtgattttttttgtgtgtggcatttttgggggagcagggaacatcaactttgttgggggaaatttctctgcataccagcacgccagcgagggcagacggccttacacactggcctgtgaacatacctatttgttggcccgcttgtgtctgtacatctgcatcatcctctgtcggaacacatcgaatgtgtcttctttgtgctcctgcccgtcagcacccaacccttccccttccgagggggttcccctagggagtgaaaaagagagtcagttgtgcacctgagcccagggcctggcatgccaggaactgggcatgggcacaaacagtccatgagatgcaggtgtttgggacacacactgagacatcaaagaaagggaaaatcaagacgcgactcacagtagaaacaaggagtactcaccctcgaagagctggcttttgagggggtgcccagagggccctggttacctcggaatgccttacccagcaggaactaagctcagtattaaatgaaatgcctgctggaggttatgatcggggtttaataaactttgggcctgtgttcgggaccctggctggcccggctatgggttcccgggaatgggaaagcagttccagacggaaactacacagaaataccacttagcttttatgatggtcacaaatgtggccaaaatgaccagggccaacaagctggttaaaaaatctacaccaggacagaaaggagccctgtaaacacctgcacatgtaaatgatcagcttctcatctgaagatgccttctgtttaaaaaacaaaaatcaactgccagctgtaagccatcttggctgtgaaggagccaagcggcaggctgcaggtggaaggactgaggccccacccactcccaccccaggctgcctgctgcgtacacgctgaccggctccctgatgccctttccgagggagcccaggccatggccctccttccagcccatcttctgcagcatctggaagcccaggttcttatcggtcagcttctgctgggcgaagtccaagtccttgggtttctgaggagagaggagagtccaggcatgtgggccacagggagatgcctggatcaagggtctgtcctaggctatgcctggagcccctcacccccaaatgccctcctgactccccagatgctcaggctcaagctccagtcacttccccagttctctgcaacatccctgggtgggatggaacttctaagtcagaggtcactggcctgaggtcagtcgtgcctctcagctaccactataaccctggtgccaagactgtgaggaaaactgggtaagggaatggccagtcccggggtcaaggagtcagtaggaaggccctcagcggaaccctggataaagaagggtggccctgtgatgaccacagggcgcagcccagggaagagtggggggcaccagggcacaggcctgcaggcaggatgggggccagacagtgggtgagaactggctggcagcaccctccctgaaccaccccaacatacccctccccgagtgcttcattcactccctggctgcattgtctgtctgtcctcaggactgagttctacttggacattggggtctgtgtctagcacagagcagacctcactgagagctagtacagctgttgattgctcctgtgggtggtggggaagtgcagcaatctctgggccactagatggagatctggagacagacagggccctggggcctctggaggaggagcctgcagggctgtagcagaaggaatttctattcactcatgaatattcatgacacactgctgtgtgacagagcccagctgggcagtccaagaccttgccatgtattccttggctcttcacgagtcaacttgtgtgggtgggctgggcgtggtggctcatgcctgtaatctcagcagtttgggaggccgaggtgggtggatcactggaggtcaggagttccagaccagcctggccaacgtggcaaaaccccgtctctactaaaatacaaaaattagccaggcatggtggcaggcacctgtaatcccagctacttgtgaggcggaggcatgagaatcgcctgaacctgggaggcagaggttgcagtgagcggagaccgtgccactgcattccagcctgggcaacacaatgagactgtctaaaaaaagaaacaaaatacaaaacttgtgtgtgttttttttaaatatagagtcttgctatgttgcccaggctggtctcggattcccggctttaagtgatcctcccacctcagtctccccattaactggaactataggtatgtgccactgcacccagcttttgatgtttttttttttttaagacggagtcttgctctgttgcccaggctggagtgcagtgatgcaatctcaactcattgtaacctccgcctcctgggttcaagcgattctcctgcttcagcctcccgagtagctgagattacaggcgtgtgccaccacgcccacctatttttgtatttttagtagagacggggtttcgccatgttaaccatgctggtcttgatcaaactcctgacctcagctgatctgcccgcctcagcctcacaaagtgctgggattacaggcatgagccactgcgcctggctgatgtatttatttaaggcatttactgaacgacctggggaggctgtgagggttcatgtgctcttgagagggagggaggaaggtgctgaggaggatcacgggggctggtgctgggggtctgagcaggggacaggtgggagtggctgggagagggttagatgaccctgggcatgggaagcagggtgagaagggcatgctgagtgctgtgagctcaggtctttgggcagtcagccctcatcagcttagcaacctgccccatgatgtcatgcaggcctcacgaggtataattcaaccaaaagacaaatcccccccttgccatctgcattgaggtgcccaggaatcagcttccctaacgttaggggtgcatgtgggaggcactccagagacaaaggagcttggagacaaggcacaaaaggctgagcctgggggagccaggggctgggagaggaaagggagaagggagagagcagggcctcaggtcaggagggagggagggaggagagagcaagtgctcccataaggaaggcctgggcctctggagctcctggggcctcagtgttctcaccctagaaagggacaaaacaacctggagaggtgctgagaactcaacatgcagcaagatgtagggggtcagaaacggataccctaaggctgggcgcggtggctcacgcctgtagtcccagcactttgggaggccaaggtgcgtggatcacgatgtcaggagtttgagaccagcctgaccaacatggtgaatccccatctctactaaaaatacaaaaattagccaggtgtggtggcacgcccctgtaatcccagctactctggaggctgaggcaggagaatcccttgaacctgggaggcagaggttgcagtgagttgagatcatgccattgcactccagccttggcgacaaagggagactccgtctcaaaaaaaaaaaaaaaaaaaaagaaagaaagaaagaaagcgataccccgaattatagcactttgacaggtgggactaaagtagcagcctcaaggtccctcccaaagcacaggaggaagctgttttcttcaagttccctatctacctagaaactggacttgccaaagaagaacacaagggccttggatcccttccctgaaatgtcattaaccagagttgaaaactcctatcacacaagaagagatggaacattaaacaccacacctagagcccagaccactggctgttctctagtcccattcaattctcaatgaggatcattcacaagatgatgcctgcctccattcatctctcctaaaatcatctgcttcccctctaaagttacctacagcctcccatctgccctctcccctacaaagaggtatttcagcttcaaccacctggcccttctttgagttttcataatgttttatatggctcctgtgcttatgcacgtgaataaatatgtataacttttttgtttcaagacaggatcttgctctgtcacccaggctggagtgcagtggctccatcatggctcactgcagtcttgaactcccgggctcaagtgatccccctgccttggccttccaaagtcccgggattacaggtgtaagccaccgcacacctttttttatcctgttaatcttcttattgtcagttcatttcaacaggcttagacttggaccttcaaaggcggagggaaattccctttgttctcttcagaggcatctccgagggtattatataaagtagctgtgtgtgtgtatgcatgtgtgtgtgcgtgtgtgtatgcatgtgtgtgtgcatatgcgtgcacatgtgtgtatcttgtgtgtgtgcgtgagttactggatgcaggcggcccctccataatggcatgaggtggtcttggtgaggcggtgtgggcagaagtgtctctgcagggcagttaaggaggggaggtatgaagggaggagctatgctatgggctgggacaggaagaggggcacaaacagtgaagagacacccctgcaaaccaggggacaccagacaggacctgctacactggggggccccttgccatgagaaagtggcctggagaaaagaggtgacagaacccaccggctgagatgagaaacggggcatccgtcaggcccttctgggagctgtgcacgacctgggccctgggatgacgggtagggaaggaaggggaaaggctggtcatggcagggcacaggggtccccagagggcaggtctgtactcttttccctttcaggaaggctgcttggaggtgcagtgggaggaagagggtttggctcagcctggaagtttcttcgtgaatgttcaaatctgtgtttaacaatcatgatggtggtttcctggacagctggaggaaagccaagccctgtgggcgaggtggaggtttgcagaggaaagctgcagccaccacggcctcccttccacccacagtcactggcagacaggaggacaggtgcagagccccaaggagacagcagcatgtgcaggacacccaccaggaaccgcgttcagtttaatcctcactgtacctcctacctgctgggtaagtgtggccatcccattttacagacaaatccgtggctcaggggttacacgccaaggttacaaaactactcggtggcagggctgagctagagtacagctgtgcctgacaccaaggtcctgctgtgccctcatctggccgtgcccttatccaggccacaccaaggggcaccagatgccagctcagcctaaaacctggcacatcagtaaggactatgagctctggactcgggaaggtccctccttcctgccataattggggtcagactgacctaggtcactcggaaggggttggaagcaacatggcactgcctgacaccagcagagcgatctcgcctggctccccgccctcctccctgaccatgaaggactggtgaagtctctccacatgtgtcccaggtgaccctgcttgcccccagcactgtgtcccccaggccatctggagtgtacctgccccctttccataacctggctccaggtcagtgaatggcagttctgtccctcttctgcccaagctgacaaccctggggtcatctggactcctggcttttgcacacccagcccacaagcaggtgtcacccactccatcttctccccttctcattgctcctcatgccctggtccaactgtcttaagtttgagcctcctcctggttcccgcccacaggctgctctccaccctagtggccacatccaccacaggtcccagaggtaccctcccttccctgagaaagggccacagcgttaacatctgttgaggtcctgtgtgaccaccccccggattcctctgctgccacaaaggcctcttgctgccccagcctctctaccgaggctgtgcccttctcagatctctacactgtttctcctcagctcctccaggcttgtgccaacgtcatctgcaagagagacctcccttggctttcccaattcagcggcatcccctcgaccccaccttattctccctctctttgacctgcttctctttgcccacagcatccccaggactgcctcatccatttctctttcactgttggccctgcttgctgctgcctccaggtggacagtcgggacctggcacgtaggaggtgctgaccgcacacaccacgctctgcttactagcagattagtgaactctcttcaccacccttccagtctactaagcttgtaagtttttatgttttattttttaaggagaccaggaggagacataggtctcactatgttgcccaggctggcctcaaactcctgggctcaagtgatccccctgtcttggcctcccaaagcactgggattacaggcgtgaatcagtgcacctggataacttgaactttttttttttttttgagacaggctctcagtctgtcgcccaagctggggtgcagtggtgcaatcagctcactgcagccacgacctctcaggcccaaatgatccttccacctcagcctccagagtagctgggactacaggcatgcaccaccatgcccaactaatttttgtattttttgcagagacagggttttgcctattgcccaggctggtcttaaactcttggactcaagcgatctgcccactttggcctcctaaactgctgggatcacaagtgtaagacacccaatcggccttagcttgaacttcttttttttttttttttgagacggagtctcactctgtcgcccaggctggagtgcagtggcgcgatctcggctcactgcaagctctgcctcccagattcatgccattctcctgcctcagcctcctgagtggctgggactacaggcgcctgccaccatgcccggctaattttttgtatttttagtagagacggggtttcatcgtgttagccaggatggtctcgatctcctgaccttgtgatccacccgccctctgcctcccaaagtgctgggattacaggcgtgagccaccacacctggcctagcttgaacttcttaagggccaagacattatctcgtttatctctcaaatcccactgcatccattacagggatctcaactatccattacacagatgaatcactagtctatgctttggacaaaggcaaaacagttttcaaaagccctcccaagagaaaagtctctgttgtgttttacacattaatacctcagtttgaaatgttagcacagcttaatcacaagctgcagcatcctttggaactccaacaaattctaaccaactatactttgagtgaggactaccaatgattacgctcaccttctttttggacatgggacgaccccgaggcctgtcataggcaattcgaactggttcatggactagaagacaaaagaaagagacacatacacatacatgtgcttttcctaaattacttagagactgaagatcttgcagtctattttggctaacagttctctgatgacagaaggtgtcttaggctctgcatggcagctgctgagccccagctcctctcaagaatgaacatgtatgacccctggagtgagcagagacgggacacgctcagggtaggcagcttgggccataatgaagggttcactgagcggtgccttgcttttggaaagtctattcaaacctaagagtccccacatttataacaaaagatccaatacatggattattttccatgactacagaaatatattttgcttcaacaaaatatttgtgatactgtgccctcctagtttatctgcagctaattcactgggaaataattaaagtctggccaggcgcagtggctcatgcctgtaatcccatcactttgggaggccgagatgggcggatcacccgaggttaggagttcgagaccagcctggccagcatggcgaaaccccgtctctactaaaagtacaaaaactagccaggcgtggtggcgggagcctgcaatcccagctattcaggaggctgaggcaggagaataacttgaacccgggaggcagaggttgtagtgagccgagattgtgccactgcactccagcctgggcgacaagaacaagagtccatctcaaaaaaaaaaaaagaattaaagtctgcctaaaactttctagtgaaaaacaaccatgcttctcatatagagaaccacatcatatcattttattctattttttatgaaagggagattagcaagtctgtttttttttttttttttttttttttgagacacagtttcgctcttgttgcccaggctggagtgcagtggtgtgatctcagctcactgcaaccttcacctcccaggttcaagcgattctccagcctcagcctcccgagtagctgggatttcaggaatgcgtcaccacgcctcgctaattctgtatttttagtagagatgggatatctccatgttggtcaggctggtctcaaactcccgaccaaaggcgatcctcccgccttggcctcccagagtgctgggattacaggtgtgagccagcacacccggcgcaggtctggtttttatctcatcaactacccaaagaactgagagcttctaatgcagaaataaaaaactccacctccccccaagaagagcatacataacaagcactctgatacactacctgccatccgtgacaagtttaattatttacttcattttttttacattaatttttttttcttgtaaagattaggtctggccatcttgcccaggctggtctcaagctcccgggctcaagcgatcctcttgcctcagtcccgctaagctgggattacaggcacgagccactgcgcctggccccatgagaagttttgaaggatggtaaaggttatagtagaatggttagcatttcactgcaacaccaaatttttcaaacacaaaacatgaggactattccaaagcaggaaaaaccataaggccactgtcacatgtaaatgtgactgtctgaatgatgtagaacacacaggtgactgtttaacacagtcccacaatggggcaccattcactacaacttcacacataggttttgcagcagaagtcccatgtgaaagcacggtccaggcctgactgtggggagacagcttggagggcattgggggcacaggagtcatctgggccacggcgtgcccatcaaaaggccacatgcgatgcaattctatgtactgacagactaggaaagatagaatacctggggcttggaaaacagtcagtggttgctgaatcgggcaggggactgcaatgggacaagagacccgttctgggaacaggcttcagctctgctgtactggtgggttctcgcctctgcacagtcaacaaaattcaaatggtccacttgaaaagggtgcgtttcactgctggtaaattatacctcaagaacccggaacctccccacaggagagcaggagatggcctctcatggccgaggcaggtcccactgaccactgcctgggaccacccctgctctgttcccatctcactgtcatgacatgaagcagcttatcagcaccctgggccttccaggggctcagaagggcccccagctgacaaagtcacaggcaggaaaacagctgagatgacccaggcccatcccctccacagttggggatgccccgacctgaatccaggcaatcagggaaatgtccagcagcaagtagagtgccagaagccacagggtagcaaggaaacatgtccttagagcaatgccttcagaccactgggaaacatgagtgtcggctcacattttggagtggtgcacaaaactcttttggattaaaatgtctccacctgtctcttctaactctcacagcccaccaaccaagaactgtgctagaggcaactgtgccgacaggcgggcactcaccttttggctcctggatgagacacactctcttgggagctggaatcatgccaaccttcaatgacttgctgctgatcctcttccgagggaagcaggtacctgaggaggcctgtgacaaggcaggtgctccagccaggtcgtcctcggcagcctcgccgggaaggccgtcggcaggggtgctgccctcagacttgcccgcccctccaggagcgggggcctcctctcccccatcctcatcgtcctcgtcctcctcctcaggcatcacctctgggctctccagctcagcctcccgcggagggggctcgtcttcaaactctgcttccccttccatgaggtccacggggctctcctgagaacccgtggtgtcaccaccaccagtgtgaaggttgtgcggagatgacgtgaaacaaattgatggacatagttcaaacactttctttcgatagaatttgaaagcagaactattttggtcatgtagaaacctggggcacagaggaaatacattgggtaaccagatggaatctctcaacatttttatttgctgaaactgctgggattgatccaaggaaggtggaggtgggacaagggaaagaataacctgaccagtctctacgcggctatggcttgatggtgcagcctctcaatgatagaaaatttgaggagtactagtaacttaataaggagctagaattcaagaagcctaactgctttccaggggacagaggcggacgaacaaggtatgcagggcttgggaaaatgctggaatagagatctggcttgagacccatctcaccctttctggttacatcactggcctctctgggcctccatgtgcccattttgactctggttcctcccaggtatgagaagcatggagcgatgccaggaggagctgcacagttactgctggaacatgtgcaccatggaaccgtaaggtgccccccgaggaggctcctcacccctagcacttcccgctctggggcctgcagtccacctacatgggcgtggagatgaggcctctctgtgcctcaggggtctggtggccacctcgacttgtaaccacagctatgaagctgtggctggtatgagaaacttgaaacactcccgaaagcaccaaagtccacttggaccaaaggaaaaatggccctcgtaaggcaactcaacctcataaatgtgccaagtccccccagttagcatattaatatatcccaataaaatcccattctgaatcagggcaagatggttctaaagttcataaagaaaaataatatgtaagagtatctgggaaaactctgaacaagactcataaggggttccagccccaccaagcactataaaatgccccaaagcctctagagttaaacagcatagtagtccataaggcagaccaaaggaacagaatagaaagaccagaaacccagcatttgattaaggtaacctctcaaactactacaaaaaaggggtgggtctttcaaagaatggtattggaaaagctggacggctttataattattattacacatttttagagatggggtctcactctgtcgtccaggctagagtgcagtggtgtgatcacagctcactgcagcctcaaactcctgggctcaagaaatcttcctacatcagccacccaagtagttaggaccacaggcaaatgccactataccaggctaacaaacacacacacacacacacacacacacacacacacacacacacacacaccacacacacacaccacacacacatacaactaaatatcagcagaaacaaatgaatctgggccgggcatggtggctcatgcctcccagcacattttgggaggctgaggcaggcagatcacctgaggtcaggaatccaagactagcctggccaacatggtgaaaccccgtctctactaaaaatacaaaaattagctgggtgacacctgtaatcccagctacttgggaatctgaggcaggagaatcgcttgaacccgagaggcggaggttgcagtgagctgagatcacaccactgcactccagcttgggcgacagagtgaaattccgtctcaaaaataaataaataaataaaacggattgtatgacaactttataacataaccacacccacaaaatgaattaactcaataagcttgagcacattagaattaaattttttctaaaggcaaaagaaacacaaagtcatcttggcccatttacaagcatggctggatagcgtccaacaccttgcccagtattgtggtcaggatccagggctctccttccagggaaggacaggacagagtactctgaaggacactgctcagaaaaggctgtcacagatggggaggaatcacccaaaacccaacaagtactacagcccaagtacccaggctaatgcaaaattctcctttaaactgtacttttcattgaaaaaaaagaaagtgaaaaagaaaaaaggactcatgggatgcccccagctgccctgcactgagctgtcctccttatccaaccctgccagaggaaatcccacatacacagtggacaggtccgaccccgaggtctacagggcccagcagctccccaaggccactactgcctgtaaaaggcaaaacctgactgtaagcctggtcaggcttcccgtctgtaggtggtcagtgccccacaaggcaggtggtaccttagtgcaggacccagtcataagccaaggctgcggaggggagtagggcttggcttgtgcaatcaggtcccaagcaagttgaaagagtatgttctgtcaccactgaatcccataaatgctctgagaaatgcacgttttcaactgtaattttaactggatgaaggcatgactgtccaacaagctaggaccagcacgaggagttgagagccccctcagtagggttctggctcagtaatgggaagatgggtgcctcctaccggcagcctttctctggaggggacatctcatgtcaccccggggaaaaaccccaggggcagtgctggctcctcacccaggttttcttgcctatgggctgtgtgcttttgagctgagctccacctatccaaggaatggagagggcaaaggtacctgctcccagcatgagcacgccaccttatccctgtgtagaagtgcctgctgtcagacctgggcaagggctgactatcactactatcatgcagtgagcagcaaatcctcacctctctcccctcccctggccaactcctatttagcctttggatgcagattaaatgtccctctggggaggtttttcctgatgcccgagatgaaggcaggtcccctagaacagattttttttttttgagatggagtttcactcttgttgcccaggctggagtgcaatggcgcgatctcggctcactgcaacctccgcctcccaggttcaagcaattctcctgcctcagcctcccccgagtagctgggattacaggcacctgccactacacccggctaattttttttatttttagtatagagacggggtttcactatgttggcaaggctggtctcaaatgcctgacctcatgatccacccgcctcagcctcccaaagtgcggggattacaagcatgagccattgcacctagcctttttttttttttttttttttggagatgaagtctcgctctgttgcccaggctggaatgcagtggctcaatctcagctcactgaaacctccgcctcccgggtttaagcgattctcatgcctcagcctcccaagcagctgggattacaggtgcttgccaccatgcccggctaatttttgtatttttgtagagatggggttttagcatggtggccaggctggtctcgaactcctgaactcgggtgattagaacagatctttctcccttaggcccctggctcagctgaagtgaagtcatgacttactcctggtataacccccatagtaggaatgcattggccaggctgtgggctggctcaggacatgcttgtggcgtgaacacactcaaatctaaagggtgtaatggccagttgcagtggagcacacctgtggtcccagctactctggaggctgaaacaggaggatcacttgagcccaggaattcaaatccagcctaagcaacatccttagactttgtctctctgagaaagaaaaaggtgtgatgagacccgggggggtacgtaccacaggtcagggttatcggtgctgttttctatgctgaattgttcgatctctggtcccacctgagcaacaaatctagccagtttctctgcagtctccattgtcttcatgtcaactacaaaacataaagcacctgtcaggcatgactcctgagctgctgctccccgtgtaaacactgcagggttgtggaggctgattataaagatggcctgcatgtcccctccctgtagccttgcccttcgtcacatgtggaccctttgtcaccaagaagtgaactctgtgtatccccaccttgaatcagggctggtcctgggactcacatcagctatagaatgtggtggaaaagcccattgccagttccaagcctgggccttggaggacttgagtacttccactgtctctcctgaagccccaaccccaattgccaggtgaacaaacatgggctggctgctggggggatgacaggcatgtggcccagccacaccatcatctcagctgacagcctggacacctgccactgaccgcagacatgtgtgggctagctcagcagatgacccagccactggcaaattcacaataccggacgcctcctggttggtttgtttggtttttttttgagatggagtcttgctctgtcgcccaggctggagtgcagtggtgagatcttggctcaatgcaacctccgcctcccgggttcaagcgattctcctagctcagcctcccgagtagctgggactacaggcatgtgccaccacgcccagctaattttttgtatttttagtagagatcgggtttcaccatgttgcccaggctggttgcgaactcctgagctcaggcaatccacccgccttggcctcccaaagtgctgggattacaagtgtgagccaccacgcccagctgatgcctcctgttttaagccacagtttggaacggctcacgacacagcaacacctaaataatgcagcagttgtggacacttttttgctctctccttcccacttagtgcttaggaagcactggccagagagcaggcctgtggtacagagagaaagaaacagctaaggtgacagaagaaacagaaggggtgaagttagtcgattcggaggaagcagtgcaggtcagcgaaccccaagaacaggaactgtggagaccctggggatgaggaggcgcaatgagaacaaggcagtcccgaagactatcaagggaggccaggatatagcaggacatgggatcccaagttcaggcaatgcaccgcccacggccccagcagcaggaccctgtcggggagcacgaaggcatggggcagcacctcataccagctccgctctcagaagaggaggagggagctgcaggactcgcatgcagctctctcaagaaagcaagagagaaagcgccaacatgtacacttgtcctggccaggtccctagagcttttatccactgccttgcctagattgcaggcccccccaattctaaagagaccctggagatgggagagtagggactggggcccagaggagggggacaggagtgagcacccactgtcagcagatgggcagggagaagaggtctgaggtgcttcagagatgtccactcctgctggcttgggggatgggcctgaggcttctaagctggggtcctgaggagaaggtccaactgggtctggcgggcagtccttggcagcatcatttctgtctggcagggatggttttgcctgtgagaggcctggagcctgccggccgtggtgtttcagcctggtgcctgaggataggagggtctgggtcccggtggtcgctctcctcgccttccagccccggagcccttgagcacggaggagcccccgccgctgccacggaaggagtttcttcttgaggttgcggacagcccgggagtacagcatggccctcactgcacagtctgctgaggtcggcttctggtcggctcctcgcaagttctcgctcatccgctgcatttctgccaacttcagcttgtaatatttatactccagactattttcatcagacaaaaacctagataacaaaacaagcataacgggacatttatgaaaacaccaccaggtcccaaattgttccttcaaacacaaaccctttctaagtggccaactcctcactgtcctctcctgtctcagaggctctgcctggctctactgaggacccagagctaggcccaagacagctgccctgctaagagtgaccacagggcaatcgggagtttgaactgagttcctccttgatttccatcagcagcagccgtgagggagctcccagctcttgatggcctggaaacacaaaccagtcaccttggagccatagcaccctggcaggcagaattgacaccttttaaatggcccagccaggatgagtgctcggtgagcttttgactgcatcaaggaaagtgtgatgtgaaccacaagagaacattaaccaaggagcctgcggcccaggtgtgaaatcttatgacccagtcatcatgatgagaacagtaaagagaaggttgagctacatgtactaacagaaaaatattcagctgggcgtggtggctcacacctgtaatcccagcactttgagaggctgaggcgggaggattgcttgagcccaggagttcaagaccagcctgggcaacaaaacaagatcccatttccacaaaataaaaaaattagccagggtggtggtgcatgcctatagtcccagctactctggaggctaaggtgggaggatcacttgagcccaggaagtcgagaggctgtggtgagctgtgattgcaccactgcactccagtctgggcaacagagcaagaccctatctttaaaaaaaaaaaaaaccttctccttctagtgtctttacttttttcatcattttccttctagcttcatgagttgattacagctcaccgcagcctcgaccttctgggttcaggtgatcctcccacctcagcctccccagtagctgggactacaggcgcgcaccaccacgcctggctaatttttgtgtttttggttgagaggacatttcaccatgttgcctaggctgatctcaaactcttgggctcaaggtagccatacgcctcagcctctcaaagtgctgggattacaggtgtgagccactgcacctggcccactatttctaataaagtcacctgaagtcactctttctcttaagtatttttatgactgcatctggtatataatgttcttcttgccacttccttctaaattgcttctaatttcagctatgattacccttcactcaaaagttattcagaaacatgttttattttggttgttgctggtttctagtttgctgtattggcataatgtggcccacgtgaatttcctgggtgtgctgtgattttctctgtgatttcatacataacgaacttttaagatgggcgtggtggctcacgcctgtaatcccagcactttgggaggcggaagcaggtgggtcgcttgagcccaggagttcaagaccagtctgggcaacatggcgaaaccccatctctttaaaaataaataaataaataaccaccccacaacaaacataacagacttttgtgaatatttgatttcagtttgtgttaaagaagaatattgcttagtaagtatggcagtatttcaggtggctttcagattgtttgatattaagtagcgacatatcagttattagatgaggttccagattaccagtgacaagccaactagaagtaaggtggctgtgtgttgcacagcattggcagcactgtgtgatgtggcatgtccctggcaggcagctccatacacaagctcctgctgacactgttagccagttgaggtctgtctggacctgacaaaacgactgagtaccggctccactgctgccctggcactctgttgggctaacggtggcatcctgcaagatcatgccctaataagcaatagcgctcaattaagagaatgctgaccaacatgggcactctggttctcaagtcaaacacagccccagcaaggcaactcctcatcaagggcagagcgcagaatcagggccaggtgacctgactgccccagtcactcatggctctgatggctttccttgttcctggatggttctgatgccaagtgcagtccgaggatgtcagtcccaaatgcatctcccaagttccagtggaacataacatcaagaacagagaacactcaacaagccagtctgctggcttcaaatctcagcatagccacttattagctgggaacctttctgtgcctcagtttctccatctgtaagacagggaagatgataagcagtagctacttcatcatacagctgtgaggcctgcgttataagcttttcactaggaggcaagtgctatgaaaactgcctagtagtcattaaccgctcaacaaatattagcagattgtctctgtttatgctcatttcctgtgttataaaatcttccacaaccttatttggattacgtcgtctacgcatttcagagaaacattaatgtctcctaccatggttttggattcatccaattcctcttatcatggttttggacttaaatgatttttttttttttgagacggagtctcgctctgtcacccaggctggagtgcagtggcgcaatctcggatcactgcaacctctgcctcctggattcaagtgattctccagcctcatcctcccgagtagctgggattataggcacccgccaccacacccagctaattttcgaattttttttagcagagatggggtttcaccatgttggccaggctggtcttgaactcctgatctcaggtgatctgctcaccttggcctcccaaagtgctgggattacaggcatgagccaccgcacccagctctggacttaaatgatttctaaaggttgtttatttacatggctcaaagctatgtagtgcaggcaccaagattcacaatctatatgttcgtgatgactttcccttttatcaggaacttcttttgctccttttagtgctgttctccttaaagtcttttttgcctaaacaattctctacatcctttctttttggtagcgttcacctgctatgcaatttcccatctctgtgttttccaattcctgtgtttttgcttctttctctctatagtagtacggaagttatagacctcacttctgttcctttaatggctaatcgacacacatacctaaacttttattttgtatcaatatccagaattaccctttagctctatcctcatgtcaaacaagacaaaggcctgcacacctacctccctccttccccttgtgcctcacatatttagatcatctgggattttagtttcttttatttcaccccaaacatcaattatttagattttatgttaactttggggtgcttggacaatcctgctgaggctagaccacagggattcttagccacttgttttcctgagtgtgtgaacacgtaggacctggtgggctctccctggagagcatggtcagggctggcccactcccaggggacaatttagaagatgagagaaaacaaagtatgacatattccttcagctttatatcctgcactgttgttatcattttctaggcttgatgctttgcactctctcatagaaaaggacggaagcctgccccttggtgttccaaacaaggaagtaaagccatagtggatgtgtctgtctatacttctgattgattcattgattgatttgagacggtgttttgctcttgtcgcccaggctggagtgcagtggtgcgatctcagctcactgcaacctctgcctcctgggttcaagtgattctcctgcctcagcctcctgagtagctgggagtataggcagccaccaccatgcccagctaattttttatttttagtagagatggggtttcatcatgttggccaggctggtctcaaattcctgacctcatgcggcccactcgcctcggcttcccaaagtggtgggattacaggtgtgagtaaccgcacctggctcttctgacatctttagtgcacgacacgaggcaggtcacctcggcaaagaggcaatggccagttctgtccacaaggctccagtgggaacaaatcatgcttgtggggtgtgagggtggaaggtctcaaatctctgctggccctcagagggtggagataagaagcccttcttatatctgcctcctagaggtctgactttttcacttgctaactaataaaaagaatttattaaggctggacatgatggctcatgcctgtaaccccagtgatctgggggatcgcttgagcccaggagttagacaccagcctgggcaacagagcaaaaacccatttcttaaaaaaagaaaaaaaaaaaaaagctgatagctgaatgcggtggtgtactcctgtagtctcagctacttgggaggctgaggcagggggattttgtgagcccaggttgaggctgcagtgaactatgatcatgccactgtgctctagcctgggcaacagaatgaaaactcatctctttaaacaaaaaaaaaaaagaacttattaatccacatatatcttcagagaatgtcaatggtcatgcataaaactgttcagtcaagaaaaagcaacataggcttattaagagatacagaggtaagccaggtgcggtggctcatgcctgtaattccagcgctttgggaggccaaggcaggaggatcatgaggtcaggagattgagaccatcctggctaacatggtgaaatcccgtctctactaaaaatacaaaaaaattagccgggtgtggtggcaggtgcctgtagtcccagctactagggaggctgaggcaggagaatggtgtgaacccgggaggcagagcttgcagcgagccaagatcccgccactgcactccagcctgggggacagagcgagactctgtctcaaaaaataaataaataaataaataaataaataaataataaaaagagatacagaggtagccgtgagaagtagtttgaagaactaagtgactgccttcaaggagtggaacatggaaacaggtcacagcagaaacatttggcttttcattatgcgttcaattgactgttttgttaaatacaacatacaaggagcattttgacttaagaattcaaacatgcacaccagaaacctaagtttagcagtttctttacttattgctgtgcttttgtatcacactctttcctcttacagtctcttggtaattccttctcttttttttgagacagagtcatgctccgttgtacccaggctggagtgcagtggtgcgatcttggctcactgcaacctctgcctcccgggttcaagtgattcttgtgcctcggtctcccaagtagctgggattacaggcgcctgtcaccatgcccagctaattttttgtatttttattagagacacggtttcactatgttggccaggctggtctcgaactcccaacctcaagtcatctgtccccctcggtctcccaaagtgttgggattacaggcgtgagccactgcacccagccaggtaattccttgtgaaggagtttttggatgataaagtctctgggaccaactcctaaatctttccttcttcaggatctattctatcagccaaccgctgagatttttatttcaatctatttttcatttccaagatccttaatagaatcgttttcatagcaaccagtgtctgtttcatggatacaatatactcttattacctgagactattcattgcacatacatatttatagactacacctcctctttctcatagtgactctgtcttctagggtgtcaggagttggttgagtttggtgatgctctttcatgatactggtttacctcaaatatcagttcttagtttgatgcttatttctgggactacaggcacccgccaccaggcccggctaatttttttttgtatttttagtagagacagggtttcaccgtgttcgccaggatggtctcgatctcctgatctcgtgatccacccaccttataggtgtgagccaccatgcccggccgcttatttctgattttgtaccctgccctgccccctatccaaacatacccctgactctggcttccgtctgctgcccctggttatcagtggtcatgagaccactgggccatgtgcaggggtcatggggcagaggcaccagcccccaggcctctcagggcctcctattcctccagcctaatcaccttatcaaccacctgtaaagtgcccctgggccttctaagtctggatgccttcttaccaagagggtcggtatctgcttgcatctgtcaatctgacaatccttcaacatgcacactggttcagaccacagaccctggatttgaatctcaactctgcctcttactagttgtggatcctcaaggcaagagggctcttggagcctcaaagtttcttgtctgtaaaataagcatagcaagagacctgcctcccaacgttgtttatgaggattcaaccagctagtgcttaaatcagtaatgtgcttagaacagtaccaactgcacagaaggcacaagtgtttattaaataaaaagtattcaataaatgatgctgggacaattaggttatttgggaatttttaacttttaagttacatgcctacctcattcaatacatgaaaataatccaaactcaagaattttgtaaaaataaaaccacaataagctccaaccttccccttggtaaatcatggtgggtaggaccaaagacatggaaatgtatgcctttcaagcatctttagtaattacaacagcaagcatagcaagtccagtatgggtacaatctgactaccaaaaagggcacactcaggaggtcaaggctgcagtgggctgtgatagcacccctgcattgcagcctgggcaacagagtgagatcctgtcactaacaaaaaacagaaaacaaaagagggcacagcacacctacagagtagcagtgagaaagtcaattagtacagataacctatggagagtaatctaatgataaacatcaatggtctccatcaggggcagctctgcctgccatgggacaccaggcagtgtctggatgtattctgggttgttactagtgagacagaaggtcctactaacatcaaacggatagaggccacagatgctgctaaacagcctgcaatgtccaggacagctccaaccctaatacagaatgatccagcctcagtgctgcagctgaggctgggcgcggtggctcacgcctgtaatcccagcactttgggaggccaaggcaggcggatcgcatgatttcaggagttcaagaccaccctgggcaacatggtaaaaccccgtctctactaaaatacaaaaaattagctgggtgtggtggcgggcacctgtaatcccagttacttgggaggctgaggcacaagaattgcttgaacctgggaaacagaggttgtagtgagccgagatcacaccactatactccagcctggcgacagagcaagattccgttaacaaataataataataaaaataaaaagtgctgcagctgagaaactgacataaatcaaaagcctctaacatgagctttaacccagcagtttcacgcccagatatcataataaactgccagaaaggtaggcagaaatacaatcaaagcactgatcatcactttttttttttttttttaagagaaatggtgtctcagcccagcacagtggcttacgcctgtaatcccagcactttgggaggccaaggcaggtgggtcacctgaggtcaggagttcgagaccaacctggccaacatggtgaaaccccatctctactaaaaatacacagatttgagaccttccaccctcacaccccacaagcattatttgttgccactggagccctgtggacagaactggccattgcctctttgctgaggtgacctgcctcatgtcgtgcacctgtaatcccagctacttgggaggctgaggcacgagaatcgcttgaactcaggagacggaggttgcagtaagccaagattgcgccactgtactccagcctgggtgacagagcaagactctttctctggcttgttctttactttctctaataagaaagtactatatttaggacgcaaactgtaattttaataagttgttcggccgggcgcggtggctcacgcctgtaatcccagcactttgggaggctgaggcaggtggatcatgaggtcaggagatcgagaccatcctggctaacactatgaaaccccatctctactaaaaacacaaaaaattagccaggcgtggtggtgggctcctgtagtcccagctactcgggaggctgaggcaggacaaaggcatgaacccgggaggcggaggttgcggtgagccgagatagcgccactgcactccagcctgggcgacagagcaaggctccgtctcaaaaaaaaaaaaaaaaaaaaaagttgttctatttacataaagaggcaattaagcaaaagacagtttaacaaatattagcaataaattgcaaacaactgcaatgatgtattactaatcttactacccttactctgtattctctgcatgcacatctcactgcatccttaaaacagcccagcagggacttggagctgtagtcacaggtgagagaaggccacccacccagctggcctaccactggtctgcagcagagctggggcttgctgaacccacataaatctgagccaccctcatgctcttctcactggagaacaccacttgctcaagtatctcaccctctgctctcaataccatcagagtgacccaaattttgccatatactccatgagagggattcacagcgtggacatttaaagacctaccagtaagcagggtcctctttgagaagagttctctctttgggagacaggctgccttcgatgacacgtttcacaagctggtcgatggtgcccactaccctgtgatctgctcgctgggggacagctggaacacacagaacagcttctctgagaaatatgctgaatgtgggctctgagaagacgaggatagttgagtagttgggggcttagtgctgaacccaagcaggcatcaacaaccgaaatcctcattcacaagacaccagcattgaaaagaggaaaacaaccaatatggaaaatctcctcctaaaaaatgtaacagtataaccactaggagagaaacagtcacagctttcaatgactggacagagcaatttatgtatatgctctagaaaaagaaagatatatagcaatttgatatcatttttcacatattacttaataatttgagtgttcataacattaaagtggaaaatataaatatctagtataaaatatacaaaaatgtatctaggttatggttctcaatataaaggtgggaataaaaaatataaatatggatacatagaaagaagactataaggaaatatgttaggaaatatgttaacagaggttatagggggtagaattatcaggaatttcattttccttatgctttaagaacttaaaaaaaaaacttgtgttttgtaatcagaaaatatatgtatcaattcacaaaaaattttctccaattaaaaaaaaaaaagaaaaaaaaaaaaggtcagccgggcacggtggctcacacctgtaatcctagcactttgggaggctgagcggggtggattgcctgagctcaggagttcaagaccacactgggcaacatggtgaaactccgtctctgctaaaatacaaaaaaaaaaaaaaaaaaaaaaattagccaggcatggtgggatagagcgagactccatcacaaaaaaaaataaataaataaataaataaaaaggtcagtgatcccaaattacatgttcacagaaaatatctgctgaatgtataagaaacaaattttggccaggcacagtggctcacgcctgtaatcccagcactttggaaggccaaggcaggcggatcacgaggtcaggagatcgagaccagcctggctaacacgatgaaactccatttctactaaaaaaatacaaaaaaattagctgggcatggtggcgggcgcctgtagtcccagctacttgggaggctgaggcaggagaatagcgtgaacccgggaggtggagcttgcagtgagccgagattgcgccactgcactccagcctgagcgtcagagtgagaccctgtctcaaaaaaaaaaaaaggcaaatttttttttttgagatggggtctcactctgttgcccaggctggagtgcagtggtcccatgacagctcactgcagcctcgaactcctaggctcaagcaattctcaggcctcagcctcccaagtagctgggattacagacatgcgccaccacgtacagctttatttttttgtacagacgaggcttcaccacattgctcaggctggtctccaattcttgggctcaagagatccaccctcctttacctcccaaagtgctgggattataggcatgagacaccatgccctgcccaaaatattttttaaagtgtgaatgtcctccaatatgactttaaatttacaatgctgccagcaacacagaacatgtttcttcgaatggtaagattgtttagtttcctaacaattgtctagttttaaaagtacagaatgatggccgggcacaatggctcattcctgtaatcccagcactttgggaggccgaggcgggtggatcacctgaggtcaggagttcgagaccagcctgaccaacatggagaaaccccgtctctactaaaaatataaaattagccaggtgtggtggcacatgactgtaatcccagctactagggaggctgaggcaggagaatcgcttgaacctgggaggctgagatagcggtgagccgagatcatgccattgcactccagcctgggcaacaagagcaaaattccatctcaaaaaaaaaaaaaaaaaaaaagcaaagaatggtctatttgttcagccactcaactcaattaaaatcactgctgaactagcgaggttttccagtttgttctgtaaatgattgcatagtcctgtgcccgtctgtgtccatgttgcagctttcagcttattttaaacactagtgtgagctcctcacacatgatgagtcaatccttcaactgccacgttattccaagtatgtcccctatgaaactgctttttttttcatggctctctttttacagagctactagttttacatgattttacaaaagatgttgaggtttacagtcagcaatgaaatttagggacccctgcaaatttggtcatctttagctaggatgaccacgaacaagggtcagaaagtgggtcacagctttggcccagcaatcctactcctgagaatgtaccctttcaaggagaattaaaaacaataaaactaacagtaataaccaaagcattcaaccaaagatgtcattccagcattttttttttttttctagatggacttttgctcatcacccaggctggagtggagtggtgcgctctaggctcactgcaacctccacttcccaagttcaagcatctctcctgcctcagcttcccaagtagctgggattataggcatgtgccaccatgccaggctaatttttgatttttagtagagacaggtttcgtcatgttggccaggctggtctcgaactcctgacctcaggtgatccacctgcttcagcttcccaaagtgttgggattatagctgcgaacgactgcacccagcccattccagcacttctttttttcttttttttctttttttggagacagagtctcgctctgtcgccaggctggagagcagtggcaagatctcggctcactgcaacctctgcctcctgggttcaagcgattatcctgcctcagccttccgagtagctgggactacaggcacatgccaccacgcccgactaattttttgtatttttagtagagacggggtttcaccgtgttagccaggatggtttcgatctcctgacctcatgatccacccgcctcggcctcccaaagtgctgggattacaggcatgagccactgcgcctggcccattatagcatttctaacaggaacataagcagcggtggggcagcctcatgagatgtgggccctgctgccacctatcccgctatccagacagggaactgaggcttgcagatgctaactacatgtgaacccaggtctgtctggcttcagaaacctctagtaaaaggcagcatgagtccagcatcaagggaaaggtgaggtaatttacattaggtcaatatcaggatgtagcaaaggctgtggaaacaaagagggctttctggcaatcatgtagaagagcaggcggtagcattttcagtccagcatgcctgcagctgcaggaaaacagggggaacatcaaagactgtgggagggtaagtgggtgggttataaccactttaggttatcggtgacttttcttccttcatacagtatgccatcactttgtgagggattggggagtagggtcccttaagccctgagcctacttctggaaggatccctctctgggagtaggtgtggccacctgtatgtggtgggacctatctagtgtctagtgctgttggggcttcctgagggtggtgaaagagcaaagaaagtcaggaacaaatgagacttcgccactggactgggggcaatggaaggtgaaaaccacatcgtgggaaaagtgctttctccctatcacaagagttaagacagcatgattaccatgtgtgctcgtgacctctgggatgtctgggctgtgagagtccattctgggagcttaggaggaaggaagagggaaaccaaacagctcatcacttctatttctcctccttggccttttcctctccccagaaagccaatgataactgctaattagcaggtgtacttaagtgattcaccaactttagccagtctacaaaagtgagtagggcgaaaaggtgtatccactatgtggaatgacctggctgttccctacacatccctcaatacagctcaagcacgacctctccaactttccaggctagactggagcctctcctgtgtcgctttaattctagcacaggggtgactgtttttttgttttggtttattgagagacagggtgattctagcccaggctggagtgcggtggctattcacagatgcaatcataggtcactgcagccttgaactcctggcctcaagcaatcctccctcctcagcctcccaagtagctgggatttcagacatatgctaccacccctggctcacaagtgactggtctttgtgattttcttccctcaggagcctggggattcctcagagacagtgctctgtgtcttttctcccttctagtaataccttgtggggacatgttggaacaagggttccaggccaggtgcagtgactcacacctataatcccagcactttgggaggctgaggcaggtagatcacttgagctcaggagttcgagaccagtctgggcaacatgattctctacaaaaaaatacaaaaaaagttagccaggcatggtggtacatgcctatagtcccagctactcaggaggctgaggcggaaggatcacttgagcctaggaggtcggggctgcagtgagccatggtcatgccactgcactccagcctgggtgacagagcacgaccctgtctcaaaaaaacaaaaacaaggaaagaaagtcaacccttctttttttcaaaggttaaaaagaaaaaaaaaggaacaagcgttcttaaccttggctgcagaaaggtacgaatcccccggatgatataggtaaaattgtgcgtgaatagatgagcattttttctggcaatggccacagctttctaccaaattcccagagaggtatttgacctaaaaatgtctaaaaatttttatttttctgagacagagtcttgctctgtcacccaggttggagtgcagtggggtgatctcagctcactgaaacctccgcctcccaggtccaagtggattctcctaactcagcctcccgagtagctgggatttcaggtgcgtgccaccacacccggctagtttttgtatttttagtagagatggggtttcaccatgttggccaggctggtctcaaactcttggtcttaagtgatctgccgcctcagcctcccaaagtgctgggattacaggcatgtgccaccacacccggctgtctaaagacttctatggtaaacagcagattcctaatacacattcacagaatgaatggcagacatatattggccaatgtgcgttttctactaaaatcctgatatgtttccaattggctaaagaacttctgtgtaaaaaaatctcgaataaaagacattaccaaagaaacacgaaaaacaacaaatagaaactttggctgatttccttaccatcactcagactacttggagccttggcctgaatttcaggtttcgtaggaggaatcattttctcctcctctcgcatcggctctggttcggctttcttaacctggaggggacatccgctgctgactagccaggccttcaggtggtctatgtactctcgcccaaacaaagtggagtcttcgaagtttggaaacgcagcaggtgagggagctatatcttgcaggccgacagcttctaagattttctcctgccggaaagaagaggccaaggaaaatgtctgtcccaaaagggccaaagacttccggcagagagagttggtggtttctagggcaagagccaagtccagggggttactgagggtcttcatcttgacacttagctcgtaggcattgcaggccataagcaaaggtgtgacactcttcagaagccggtcttgaagtctcattatgtacttgtcaaaaggctttatgatttcaaaaaagcaatttttggtcttcacagcacctttgtctaaaagcatgtttaaaaactcattatcaactctgggtgttttcaaagcagagtgctttaaaaatttgatagtaaaaaagcaaaaatctctgtgctctggttttaaggaacatttgaatgaggcaagcattttagcacaggtttctgtttcaagttcaaagagagtctggaaaagttgggaaaatttaatatcatcttttatggtgtggaatcctgcccatttgattatttctatcccaaatcttgaaaaaacatcagacttatctatgatgtcaaagctcatctttcttctggggagccgaagattcttcagatccagccccagagggatcttctgaatggggaactggatatcttctgtccctgggtttgtccccagggtcacatcaggacttggagtgtttttctggatttggttagtgccctgagttttgggagtaatacgattcacggtgggtattttttttgtgctcacatttctcaatgtgacaagtttcccaacaccccccttagctgtgagcaggccctgagtctccccctttcctaggagggaaccttcctggtcaacgatgtttagagctcgacctctggcctggacttgactgccgcccctaagcacagagtcagcctccccaggatggtccacgtcataatcccgactctccttctccaaacactctttctcaatcagcctggaagatccaaagtcccccaaaactgcagagggaccaaaactatactcctgtgaccaagaggactcttgagaaactggatggccaaagtcttgttcccaagaaccacggagcgcaaatttccagtcctgagaacggaaatgccccaatttccggtggccaatgacctggtcccgagaatcagagtgagaaaattccagatcccggccacattctttgcgaaagtagctgtcatcactgatggaagggttgcttgatctgaaggaaggccctggaaatacgtcacttctcaggccttctcttccggcatctctagagtgagctacagatccactgagggagtatctgccatcgctgtggacgtcatcatacatctctgctctggatcttgggactgcccttaagagatctgaaataaaccatccaaaaaaaaaaaagaagaagccaaaagatactttagaccagagaatgcaaacagtgcaaacaaacagtccacggatcaccaggcagcaaaactgctttatacacctcagtgctttttgccaatctgtatttgctgccaacatttaaaatgcgtgtggtgtcacttaaaaatctggatcgactacttactaaaacagaagacctataagcaccaagcctgagtttgccctgatgacgtcaacccaggctgggcagtagcagcctgacgggcaagacacagactctctaagttggcaccaacagccctcgctcattcagatccccctactctctagccatctgggttgacaatccctcttttagtctgaggaaagggtgtttggtccccaaataacctggatatttttactgcaactggagcacttctgtgtttctacttctatctcagaacagacaggttttattgaggctacctgccttcactgcctcttagaaggaagtctcagcccacagtgccaccgtgaggctagaggaaccatagctaacaccacacccaccacagctgacccaaagctggctgaacccatccctcggaaaggtcggccaggccaatcaaccctctctctggagctgaaaaaccacagaccgaggcaggcaggagggaaggcagaagcttaacaagatacatcaagagaggccatgatggaaactgaacagtgcccaattctgtccttctccatgtagaaaaggggaaatgggccaggcacagtggctcaaacctataatccctgcactttgggaggccgaggtgggaggatcacttgagcccaggagtttgagaccagcctgggcaacatagcgagaccctatctctgtcaaaaataaaaaagggcggaggggaagatgtacttgcatttgcttaatcacacatggagaaactgtaagaagcgaggaagagaagtgaactacgggcatatgagaacagtgggcctcagggagagttttcatggaatgcctttctttctagcttttcaatcagaatcgatgacctagttaaaaaaaaaatcaaatgaacagggaaggagaggtgccaggaggtagcaataggttaagaggccacaggaagccaaagtcgtatataaatcctagttcacttgttcaacaagtacaaactgggcacctactgtgcgcaagcactgtactaggcactgaagttacagcaagaaaatgagaactcttccaaacttgtcagttgagagagccagacaataaacaaaaatatatcagatgcaagttaagtaccaagaagacaaatcaagcacgtgggaacctgaggaggcaatgacattttgagacaggctagtcaaggagggtagctctgacacttttttttttctttttttttttgagacagagtctcgctctgttgcccaggctggagtgccggagtgcaagggtgcgatcttggctcaccgcaacctccacctcccaggttcaagcgattctcctgcctccgcctcctgagtagctgggaatacaggcacccgccaccatgcccggctaacttttgtatttttagtagagacagggtttcaccacattggccaggctggtctggaactcctgaccttgtgatccgcccacctcggcctcccaaagtgctgggattacaggcgtgagccaccgtgtcacgctgcatagctctgacactttatctagcagcagtggcctggcatgaggagccagaccgtacagttacaaagggaagccttccaggcagagggggaatgaggacaagaccctgaggtgggaccagtagggggccaatgtagacagaagggaacacagggaatgaaaggccaagtggtaggaaggcagctcccaaactctgctactggagccccagggaccacctccccagacattcttacttaattaaataaggggatgacctgggcatcagggtttttaaaaggcccccaggtgacgctaacgtgctacaaagttagggaaccactaatataagagacacaaatggagaaggagtaccagatccaagtcgggccctcagtggtactctggaatttactctgggagagacagaaggctagtgaagagttctaagcagagggatgatctcactggctgctgcacagggaacagattaaaggagatgagcacagacgtggatgttcctgcaagaaatccactgtgataacccaggtattgatgattggtattgatggcatgattagggagggaacattagtgacagagagtgatggctggattctactcaagagaattttctcataccctttatgaggagatgaaaagttcagagtggagcagagaaacagagaaaggctaaacgatagactgctttgcaacacagaaatgttccagaatcacctagcatactgctaggtttctagtcctctcccacccacggccccctaatctgtcttttttttttgagacggagtctcgttctgtcacccacgctggagcgcagtggtgcgatctcggctcactgcaacctccacctcctgggttcaagctattcttctgtctcagcctcctgggtagctgggattataggggcctgccacatttttgtatttttagtagacacggggtttcaccatgttggccagactggtctcaaactcctgacctcaggtgatctgcccaccttggcctcccaaagtgctgagattacatgtgtaagccactgcacctggccgtctttttttgagacagggtctcactctttggcccaggctggagtataatggcacaaacacagcttactgcagcctcgacttcctgggcacaagcgaacttcctgcctcagcctcccaagtagccagggccataggcgcatgccaccatgcccagataaatttttttttttttgagacggagtcttgctctgtcacccaggctggagtgcagtggcacaaccttggctcgctgcaacctccgcctcctgggttcacgccattctcctgcctcagcctcctgagtagctgggactacaggcgcccgccaccacgcccggctaatatttttagtagagacagggtttcaccgtgttagccaggatggtctcgatctcctgaccttgtgatccgcccgcctcggcctcccaaagtgctaggattacaggcttgagccactgcgcccggccattttttttctttttttttttttgagatggagtctcgctctgtcgcccaggctggagtgcagtagcgcaatcttggctcactgcaggctccacctcccgggttcacggcattatcccgcctcagcctcccaagtagctgggaccacaggcacccacaaccacacctggctaatttttttttttttttgatttttagtaaagacggggtttcaccattcacaggatggtctcgatctcctgaccttgtgatcctcccagcactctgggaggccgaggcgggcagatcacaaggtcaggagttcaaaaccagcctgaccaacatagtgaaaccccatctttactaaaataaatacaaaaaaattagccgggcatggtggcaggcacctgtaatctcagctactcgggaggctgaggcaggagaatcgcttgaatccaggaggcacaggccgcagtgagccaaaatcacgtcactgcactccagcctgggcgacagtacaagactctgtctcaaataaaaaaaaaaaagaactagtagagcttaaacctgggcagcggtgacagggatggagccaggaaatggatccaagaacctgtcttggggctgggagcagtggctcacgcctgtaatcgcaacatgctgaaggcagaggtgggaggatcacttgagcccaggagttgcagaccagcctgaaaacatagcaagactccatatctattaaaaaaaacaaaaaacaaaaaaaacaaaaacataaaaaacaccaaaaaacaaaactgggctgggctcggtggctcatgcctgtaatcccagcatcttgggaggccaaggcaagtggatcacctgaggtcgggagttcgagaccagcctggccaacatggtaaaacctcatctctactacaaatagaaaaattagctgggcgtggtggtgcatgcccgtaatcccagctactcaggaggctgaggcaggagaatcgcttgaacccaggaggcggaggttgcagtgagccaagaggcggaggttgcagtgagccaagatccctccattgccctccagcctgggagacaagagtgaaactccgtctcaaaacaaacaaacaaacaaacaaacaataaacaaaactgtcttgaggtgggtcggggaggatatccagtgagaagctccagataactacataatgatgactgacagatcaaaacattatcccctgaccaagtgcagtggctcatgcctataatcccagcactctgggaggcagagatggaaggatggcttgagcctaggagttcaagggtgcagtgagctaaaactgcgccactgcacttcagcctgggggagagagtaagaccctatcacaaaaaagaaaccaaaccaaaataaaaacctttacctcctcctaaataaggaaactaaggatcagaggactggtattatttgcccaaggtattgtaatcttcctgccttggccctaagatacacccctaccaaaacaacaactacaacaacaacactttattttaccttgagctttaaactgaagagtttcgcttacagcctcaccactggcatccatgtgatatcgtttggctttttcttgtaatacagcatcaaaagtctcctgtgtaattcgtctggctgccatgttattttgccctatggtgagagagaaaaaaatacactaagagcaacaacttggagctgggcgcggtggctcatacctgtaatcctggcactttgggaggtcgaggtgggcggatcacctgagctcaggagttcgagaccagcctaggcaacatgatgaaactaaaatacaaaaaattcaggctgggtgtggtggctcacacctgtaatcccaggactttgggaggctgaggtgagcggatcatttaaagtcaggagttggagaccagcctggccaacatggcaaaaccctgtctctactaaaaatacaaaaattagccgggcatggtggtgcctgcctttaatcccagctacttgggaggctgtggcaagagaattgcttgaacccaggaggcggaggttgcagtgggccgagatcatgccactgcactccagcatgggtaacagagtgagactccgtctcaaaaaaaaaaaaaaaaaaatttcaccaggcatggtggcacgtgcctgtaatcccaaatactcaggaggctgaggcatgggaattgcttgaaccagggagacagaggttgcagtgagccgagatcatgccactgccctccagactgggggacagagcgagactgtctcaaagaaaaaaaaaatgcgtgctcacagaacctgctctatttcacttaatcctcgaagtaaggaggcagtaatccataatcctcgcatggtacttcagaggcaagctggaccctttttatttatcttttttttttttttttttaagtagagacagggttttgctaggttggccaggctggtctcgaactcctgacctcaagcaatctgcccaccttgtctggactcttttaagggggtctctgccctcacgaagttcacaggtgtgtgctggctgaaaaggagcaagacaaaccttctctgggcccatctccttggaatccattaaaagcagctctgtgaaagcagttctatctgctggaggaaggtgtcaaccaacacacataactgagcataacagagtaggaagggtgggaccacaaccctcgcaaatcgtggttaggaaagaagagatcaatcttttttttttttttcttcctttttttgagactctccctgttgcccaggctggagtgcagtggcatgatctcggctaactgcaacctccgcctcctggactcaagcaattctcctgcctcagcctcctgagtagctgggattacaggagtccgccaccgcatccgactaatttttatattttaggtagagatggagtttcaccatgttggccaggctggtcttgaattcctgacctcaagtgattcgcccgcttcggcctcccaaagtgctgggattccaggccgtgagccactgcgcctggcccaggatcactcttttcccattcacagactcagcagggcacagaggctctgagaacttccttcccttctaaaagaagcctcttgacagtgagtggcgggacccccaaccaatgacaatgaactagtgacagttcattctgcgctgggtccttgcgcgatctcccaaccacccactgaagaggcgggtcctgttatgaatgacattagggtgaggaggcaaagggagacagactcaacgacccattcaagaccagacagcccagatttgaacctggcaaaaagggtattcgtgcatccaaagccccgaagaatgagtaaaaagattaagcaacattttggggtccaggggctgcatccttaaccatcaagatatcccgcttcgcaaaacctccaacttcaagagacaacccgtagggtccatttcccatcacgatcaccgcctcccccacccgcctcccccagtcccatccttcagcccttttcccggggcgcccccttgttctctgctggcaaagggcagggttcccgggtcaggtgacccaggttcaaatcacacgattctaagctttctgtgcttccgtttccccacctatggaatgggcagccagtaaaggggctggtgtgggggctgaaccggttctaaagagggcaagggcccgatgcagcgctgggcgccgttatctcctcccgagcgggggccgctccgagttcgggaggaatgaatgaacgactgaaccaatgagcctttgtggacgcggcccgccgtctcccggcctctgcgggcgaggaaatgggggcgccgggcccgggaggccgcagccggccacccaggccaacccggcggggacgcggccgccgccgcagccagagggccgagcctgcgacgccatcacggagcccggggcgggcccccaaggccgagcccgagcttcccaccccgggagccacccaccgacgacgccagggcccgggcctcaccccgagaccaccgcgcgcggagccacccccgccgccgcctcaggctcctcacccgccgccgccgccgcgcgaggcggggacatgcaaatgaaccaacggtctccgcagcgccgcgccgcgcaggcgcaagccgccgccgagtcctggtgcgcaggcgcgggccgccgcggcccggctctcttgcgcaagcgcgctgtccgcttcttctgggcggacgctctggaggcaaaacatttccctgctgggggcggcgaccaccgtgagcgtcccggaaggggcggcaaagacgcctccgtcgcgcacgaggtggcctcgttggctttaccttggttcgcggtcgtccttggttatcgtgagcgtccgcgagtctctgggaggccaagcctaggggcgccacagcgcctgcgcgcgtacggcggccggaaggggctagaggcggctccctgggtgacaaccgcgcgccccacctttccccacgtggccgcgaagaccgggtgagacgctgcggctgccgaggcctgtcccgcgcggagtggggagtgggggtgccgcagggtcgggctggcgcgaccctcgggtacgtggtttggggggaaaaaaaaaatgaaagaattttacagaagccgcctggggacaaaatcctcggcttccctggcattcgctttattttcattcattttatttattcattcagcacctgtgcactgagtgcctgctgcgtgtcgggccccgtcctaggcagtggggacaaggaggctacagggtacaaataaatgagtgaacgatgttgctctagatacaggtaatggtgtgcaaataataacagagtgatgggacgggaaagcagggctgctctttatctagaagtggttttgaaggctgtctcttgagtgctgggaaggatgagaaaggcggggaagaggaacttggaaggcttagatagagaaggtgcggataaggaggctgggttttgttctgagagggttgggaagccactaccgggctttgagcacgtgagtgaggtggagtctaggctctgggagtggcaggtgacgccgcccttaggggaggctggtgtttgaaccagagtgggtgtggctggtagagggacatgtggatggagtcttttagagtccccagcatgtcatggcacacgtttaattttcttttgagacggagtctttctctgtcgcccaggctagagtgtagtggcatgatcttgactcactgcaacctccacctcccgggttcaagggcttcccctgcctcagcctcccgagtagctgggactacaggtgcgcaacaccgcacctggctaaattttgtattttttttttttttgaaacggagtcaaaaggagttcaagcgatctcctgcctcagcctcctgagtagctgggattaccggtgtgcactatcttgcctggcctttttttttttttttgagacggagtctcgttctgtcacccaggctggagtgcagtggcgcaatctcagctcactgcaagctccgtctcctgggttcaggccattctcctgcctcagcctcccgagtagctggaaatacaggcacccgccaccacgcccggctagtttttttgtatttttttagtagagacggggtttcaccgtgttagccaggatggtcttgatctcctgacctcatgatccgcccgcttcggcctcccaaagtgctgggattacaggcgtgagccaccgtgcccggccctggctaattttttgtattttcagtagagacaggattttgctatgttggccaggctgttctcaaactcctgacctcaagtgatctacccgcctcagactcccaaagcgctgggattataggcctgagccaccgcacctggacagcacagttttcttgatgagcagattcctggctgagagaaggaaactggctgccagttaggggccttactcatcttctgttttaccctcagcatgccctgatggataatagggactggtaatgctgcttcccccttttagcctaggctgttctccaggtaattcttacttggccatctccaggcaccatcttatgtgttccaaatctgtactttcctcctccaactcagccctgtaccagatctaggggaccttggaggactcaggtcaggggtggtcacagagccagaccttcccaactcagtcagctcaggggtgggtggaagggaggggttgtgggttggggagtgaagccagagagtgtgggctctctgagtggccaggaaaggcagccacctggaagggctggcagaagctccacagaggactgagaatccgaagtatttgagacaggtgtcaatcagttagaaagcttattttgccaaggttaaggacatgtctgtgacacagcctcaggaggtcctgacaacatgtacccaaggtggttggggcacagcttgcttttatacattttagggagacgtgagatataaatgaatatgtgtaagatggtcacaggtagagacaaatgattgctttcttttgagtctttggtcagcctttcacagaatacacgatttatatggggtacagggcaggtagaggaatagtcatttatgcctcagtccgactcatgaatctgaggttttgtttcttgttttttgttttattttttgagatagagtctcgctctgtcgcccaggctggagtgcaatggcgcaatcttggctcactgcaacctccacctcccgggttcaagcaattctcttgcctcagcctcctgagtagctaggattacaggcgcccactaccacgcccagttaatttttatatttttagtagagacggggtttcgccatgttggtcaggctggtctcgaattcctgacctcaggtgatccaccggtgtcagcctcccaaaatgctgggattacaggcatgagccacggagccaggccaaatctgcatttttacataaacgttagggcagagagagcaactggatatgcatttgtctcaggtgatgactttctgtcctgcacttgtgaagatcacctgtcaatttacattgccagggtgacattcaacaaaattgttttcaggtaaagatcttgagggccacaaggaatttcctggcctggccggggtggtgggagtggagtcccctactccttactccctactgagaaactctttatattactcttccttcacctttaaccttggaaatccatagcagcccttaaagagctcccttttcttctggggcagaaaggagaggggcctatctgcaaaagagtgagatgggactcctgcataaacttgctgaattgcctcttaagcaacaaaggaaaggaacaaatagctaatttattgagcctgtccatatcctgttctgaggaaggtataggagttggctgaatttttcactactgccctatgaagtagattcgtgtttatctctgtttgacacatgagggaattgaagaaaagtgtatctggctgggcgtggtggctcatgcctgtaatcccagcatgatgggaggccgaggcaggtgggtcacctgaggtcaggagttcgagactagcctggccaacatggtgaaaccctgtctctactaaaaatacgaaaattagctgggcgtggtggcgtgggcctgtagtctcagctacttggaggctgaggcacaagaatcgcttgaacccaggaggcagaggttgtggtgagccaagatcgtgccactgcattccaacctgggcgacagagcgagactctgtctcaaaaaaaaaagaaaagggcattgaagtggagggcatgggaactgggttctgcaggctggctgcgagccagtccttctcccgtcaggcagtgtgcagtccatggtgggcatctgcaggaacacagatggaatgtgtatatcccatgccactgcctgaaaagagaagcatgggccagagtgacctgtttctttttcctttttttttttttttgagacaaggtcttactttgtcacccaggctggagttcagggatatgatctcagctcactgcagccttgacctccctgggctcccacctcagcctcccaaatagctgtaactacaggtgcatgctcccacacctggctaattttggtattttttatagagatggagtttcgccacgtgtccaggctggtctcaaactcctggcctcatgtgatccttccgcctcggcctcccaaagtgcaggccaccatgcctggcctgaagtggaaacttgataattccagaacggaaacttgatattactgcaataagcaaggtggatatattgaaacaattaaaatttaaaaagttgttaacctctgttaggctctggacctaaggcctgttcctccttttgttccaaagggacggtggcaaatgttaggttcactcgtaccctgtcaagaccttctggttaagatcatctacagcaggggtccccaattcctgggtcacagacccatactggtccagtggtccctggcctgttaggacctgggctgcacagcaggaggcaagcgtagggtgagcgagtgaagcttcatctgtatttacagcaactccccatcacttgcattatgcctgagctctacctcctgtcagatcagcagcattaaattataggagcacgaaccctactgtgaactgcacatgcaagcgatttaggttgggcactccttatgaaaatctaatgcctgatgatctgtcactatctcccatcacccccagatgggactgtctagttgccagacaacaagctcagggctcccactgatcctacattacagtgaatagtataattattatattacaatgtaacaataatagaaataaagtgcacaataaatgtaatgagcttgaacaatcctgaaaccatccccaccctagccccaccatatccatggaaaaattgtcttccacgaaactggtcccttaggctaaaaaggttgggactgctgagctacaggtttgaaacagaattgcaaagggatttggtgtttttaccaagagttttatcttacttaactctatgtcttgttcccacctgtcagagtggaaggtactgcccaaggttagtgggtcatctaagtgttgatacctacccctggtttccagggtatgcctatactgggttttacttgtttgtttatttatttattttttgagacgaagtcttgctcttgttgcccaggctggagtgcgatggcgtgatcttgtctcactgcaacctccacctccctggttcaagccattctcctgcctcagcctcccgagtagctgggattacaggcgccccactaatttttgtatatttagtagagacggggtttcgccatgttggtcttgaactcctgacctcaggtgatctgcctgccttggcctcccaaagtgctggtattacaggcatgagccaccatgcctggccttacttgcttatttttattttataaggtgggtttgtgtgtatacacacacacacacacacacacacacacattttttttaagagatatggtctcactgtgttgccgcaggctggtctcaaactcctgtgcttgagtgatccccccgccttagcctcccaagttgctgagattacaggcacaagtcattgctcagttctttttgtttttaaacagattagcactttaagaaattgagctataatttacataccataatattcactcatttgatttagtaatttttttttttcttctggagacatggtctccctctgtcatccagaccggagtgcagtggcccagtcacagctcactgcagccttgaactcctgggctcaaatgatcctcctgcttcagcctcccgagtaacttcaaccacacgcaaatgccaccacacctgactatatttttaaatttttttgtagagacggggccttactatgttgtccttgctggtctcaaactccagacttgaaacagtcctcccaccttggcctcctaaagcactgggatcacaggtgtgagccaccatgcctggcctgatgtagtgattttacgttttcacagagttgtacaaccatcatcactataattcaagaacgttttcatcacccagaaggaaaccctatacccattagaagttactccccattccctctcctccagtccctggcaacacccagtctgctttttgtgtctgtggatttgcctgttctggatatttcatgtcattggaatcgtgcaatatgaggcttttcgtgtctggcttctttgacgagacatcatgtttttgaggtctatctccattgtagcatgcttcagcacctcattcctttctctggctgagtaatataccaccatgcgcacagaccattttatccattcatctgttggtagactccgtctccttttctttgttcttgtgatttatttgttgaaaactctgggtgtttgtcctctagttgacattctcttccctagtagggattttgcagatcacatccccatggtgttggttaaggtgtcagagctgtgctgtgcaataccatagtcactcgtcacacatggctatttacattaacaaattaaaatgaaataaaattacacactcagttcctcagccacactgccacacttcagctgtgtgatagccacagaggccaatggcttctgtactaggcagtgcagatagagaacgtttcatcatagcaggaagtgccctgaatgcatgatcagattcgggtttgagattttggcacgatgacttcacaggtgcattttgttcttgttcaggaggtaggtgttgctggtttctcttgatgatgtgagatcaagcagtagactgagttcctgtctaccccttgttgggctcccatcagttttacacctgatggttttggatcctgtgggatcattatctgtttctctcctgtcacagctgatcagctggaatcggaagcagaacttttcctcatcctctttttataacctgggactcatttgtacaagggaggcaggttaagtgctaggttttttttaaaaaaattgttactaattattgtagagacagtgtctcgctacgttggccaggctggtcttgaactcctggattcaagtgatcctcccatctcagcctcctgagtagtagctgggagtacaagagcatgccaccactccctgccaagagctggattcttggccagttttcagaagcctgagctgtatttgttttagtattatgaaagcacagagtttgacttttttttttttttgcaacatcgtctgactgtcagccaggctggagtgcaatggcatgatctcggctcactgcaacctccgcctctgtgctcaagtggttctcctacctcggtctccctgattgctgggattacagacgtgagccaccacacctggcccagattttgattttgatatgtactggatttttttttaatgctcacttgtctcatctgtagctaccaggcatcccttagggtttggaagcttccttgcttcctggtctcacaagaccccagcgttacctgccccatgacctgctgggacttggaatcagccattcctccagaagccctggctccttgtttttaaagattttatgtagagacagggcctccccatgttgtccaggctagtgttgaactcctggcctcaagccatcttcctgcctcagcctcccaaagtgctgggattacaggagtgagccacctagccctggccccagctccttttcgtgggaaatggtagaaaccatacatggtgttagaggtattcagtgctcctgtgctgtcatttctcctaggcatttttagttgctatgactagaaaattagatctttgtttacctaagagaaaacacatgatgggtttatatggatattcccatttcatatataggagttctgagattttttttctcaactttatcgaggtataggatgtacttttttttgagacggaatcttgctctgttgcccaggctggtgtgcagtggtgcaatctcggctcactgcaacctctgcctcctgggttcaaatgattctcctgcctcagcctcccgagtggctgggatcacaggtgcccgccaccatgcccggttaatttttgtatttttagcagagatgggatttcaccatgctggccaggctggtcttaaactcctgacctcaggtcatccacctgcctcggcctcccaaagtgttgggattacaggcatgcgccactgcacccagcgaattgtatttaatatagtgtatatcttatactatatatggtacataaatgatacaaatatattgcatatgtttacattatacaacttgacgattttatatgcatgcagattgtgaaatactcacctcaatcaacagttacctttttcttttttgtggtgagaacacttagaatctaccctcttagcaaatttcaagtataccatacaatattgttaattatagggagttccgagtttttagttgatagtacgatgttagaatcttttttttttctttttgagtcaggggcttgctctgttgcccaggttggagtgcagtggcgcaatcttggcctcccaggctcaagcgatcctgctacctcagcctcctgagtagttgggactacaggcatgtgccaccacactcagctaatttttatttttattttggtagagacagacttttgccatgttgtccaggctggtcttgaactcctgggctcaagcaatcctcctgcctcagcttcccaaagtgttgggattataggcattgacccactgcgcccagccagaatcttttttcttttattctgattcctaataagataatcattattatttgctacatccgtaatagtttcagaataacattactagtatcattatattaaagaaccacctttcttagataaaatgtagtaaactctgtgttctctcctacactttgtttttttttcccaagacagggtctcactctgtggcccaggctggagtgtagtagtgtgatcatggctcactgcagccttgacctcccaggctcaagtgatcctcccacctcggcctctcagagtgccgggattacaggctaagccatcacacccggcctcttctgtatttgcagaagttctagggaagtagggatatcaccctttcctgtgataacaggtgggaagaatttctccagggtggttgtagggctctggtcgctggtagatgcttcctaagtggcgttttcaaggtggccaggccctgccattgcctgctcacccttgaggtagctctctctttgccctaacctctcagctcaggagcatctatcggctgcacgccaacatcaacacaggcgaagatggtctccaagcgcattgcccaggagacctttgatgcagctgtgcgcgagaacatcgaggagtttgcgatggggccagaggaggcagtgaaagaggccgtggagcagtttgaatcgcaaggtagggtggtgtgactgtcacctaccatccttggctcttagatgcaagagcagtgggagagccctgctgccccgccccactgggggtgccacatgcctggcatagaaaccaggtgccattgggccctgtcccctccagcttctgcccgaggcaggctggttatcctgctcccacctctcacctgcttccacctcgcccagatatttgtgggctggatccttctcatgagtctcatttgatcacttccttgaagagactttccctgaccctggcctgggaaacagggcccctgcctccctgccctactctaccctacctcgagcttacagaggcagaagcagcctgtggaaacaggtggcatgttcagaccaggtgcagatgagtgtggttatgaggggctgtttgcaatggtgtgggtggggttaggagaccacccctagcacaactagctccggcagagaccctgactgcagggagcaggagtcctgggcaggggccacatgatgggtgctgggccctggggcagaggcagggggctgggaatgaacaccccacactcccctcctcctgcccccatctcaagttcacttccccattgaacaaacccagggtacagcctgagaggtcagaggtcagcctcctaggcacagagtggggtatagaacactagacaggggccagtgggacaagcaaaagcgtccagcactgtaggggctccctgtgggggtgccagcaggggcaagaatgcagccagagccaggagggatgggagccccaagggagaaggctgtggggtccctccctcccccaccaagcccaccaggcagcatgtggcacctcactgcacagacgtggcctgtgatgacagccttgtgtgacaacggcctcactaccactctgctccctttggcccacggaccagtggcagaaacacccaataccctctacacccccgtgatgatgtggcatgggcgggaatagggaggtgggaggcttctggagtggggtggtcccagcagaagggtcctgaggtgtgattccagcaggcccacggggatgacagctgtcactttctttctgacccctgtgtgcttgcttcccccacccccaacaggggttgatctgagcaacattgtaaagacggcacctaaagtctctgcagacggatcccaggagcccacacatgacatcctgcaggtaggagtgggcatcccacacagcaggtcctgcgtcacctctgtctgggggcacctcttccctgtttcctggatggcagaatacaggctctgaaggtcatgccctccccagcatgcatgggcaagcttgagtttgcagccaggtctccctgagtccatgtccgagggcggcatgccttccaatgcaggggatcccaggctcctgtggtggcatgtatgctgaaatcaggtagatggcttggttgtccctgctgctgggatcccagagtcagggacaccatagaggtgcccctctggcttcccagagacagatggtcaggactcataggacgagagagtgggctcacagtaaggctgtcacttactgagcactgactgtttaccagcactttccagccagtccgttagcactgaagctcaccagtgaagtaggtggtgtcattcctgtcttagtgatggggaaacaggccaggagctggcacttaacctctccagagaccgaaagaaggaaggtaaaagaacttcaatgctttccgtaaggtcgcccatcaaactttgtaatacagcagaaggctccggtgtttgagaaccgactgtgggcctggttctgtgcaggtacttttttcctgtcttcttggtcactgtccaaacaacacctgcaaggctgggatttccccattgtagagatggggacattgagatccaaagagaagagaagtcattgacatgggagcaggaggtgcagtgataggagaggaagttggaagagacggctctgggtgtaaacccggcttgcctaaggcatgacacttacttctccctacctcggggtcctgccctctcctgccttgaggaggtcttgtgaaaattgcctcgttgttgttagtttgctttttgcctttcttgcctaataaggatgaatttattttattatatatatatttatttatctattgagacagagtctcactctgttgcccaggctggtgtgcactggcgtgatctcagctcactgcaacttccacctcccagattcaagtgattctcctgcctcagcctcccgagtaactgggattacagacacacgccaccacacctgactaatttttttgtgtttgtagtagagacgaagtttcactatgttggccaggctggtctcgaactcctgacctcaggttatctgcccgcgttggcctcccaaagtgccgggattacaggcatgggccacagtgcccagcctggatgaatttattttaaaatgagtttgtcttctggctatctttgcattgggtgattcatctttttcctactgatttgtagatgaagtttatataggaaggatctcaataacaatatcgtctatattgtctagcagttactgcttaagtacttcttaagtgctcagcattatgctaaattctttttttttttgagacaagagtctcactctgttgcccaggctggagtacactggcgcagtcttggctcactgcaacctctgcctcttgggttcaagcaattctcctgcctcagcctcacaagtagctgggattacaggtgcacaccaccatgcccagctaatttttttttttttttgagacagagtctcgctctgtcacccaggctggagtgcagtggcgtgatcttggctcactgcaagctctgcctcctgggctcacgccattctcctgcctcagcctcccgagtagctgggactacaggcgcccgccaccatgcctggctaattttttgtatttttagtagagacgaggtttcaccatgttagccaggatggtctccatctcctgacctcgtgatccgtctgcctcggactctcaaagtgctgggattacaggcgtgagccactatgcccggcctattatgctaaattcttaaaatatgttctcttaatctgtgctcagcccatcttgctggtgaggtatctgaggcttcccaaggatcagtgaccacgcccctgcaccccgaaaggtcagctggtgagaggcagagctggtacccggatccaggaagcaaagcactgaaaggccgttctaccagcagtacaggaaactccgtgtttgtttataacattcgctcctttttttttcttaactgttcttttatttattcatttatttattgagacagagtctcgctctgtcgcccaggctggagtgcagtggcgtgatcttggctcactgcaagctccacctcccaggttcatgccattctcctgcctcagcctctggagtagctgagactacaggcgcctgccatgacgcccggctaattttttgtattttttagtagagatggggtttcactgtgttagccaggatgatctcgatctcctgaccttgtgatccgcctgcctcggcctcccaaagtgctgggattacaggtgtgagccaccacgcccagcctatttatttattttttgagatggagtctcactctgttggccaggctggagtgtagtggcccttcctcagctcactgcagcttccttctcccaggttcatgcaattttcctgcctcagcctcccgagtagctgggattacaggcgtgcaccaccacgcccagcggatttttgtatttttagtagagatgggatttcaccacattggacaggctggtcttgaactcctgacctcaagtgatctgcctgcctcggcctcccaaagtgttggggttataggcatgagccactatgcccagcctattttttgttttgtagagatgggatcttgctatattgcccaggatgatcttgaacacctgccctcaagtgaccctcccactttgccctgccaacatgccaggattacaggtgtgagccaacatgctcacctgtttttttttttttttctttttctatttcttttttttttttttttgacacaaactctcactctgtcacccatgctagagtgcaatggcaggatctcggctcattgcaacctccacctcccaggttcaagtgatgctcctgtctcagcctcctgagtagctgggattacaggtacctgccaccatgcctggctaattttaaattttatttttcattaaggaagagtggaaatacattcttagcataaaggattcaagcaatactcaagcatttatagtaaaatctgaaagtccctgccttgtccctcccaccagacactggggtttgcatctcagcggtcagttcgcaactgaaccaacccccttctcaaatgccctgcagcataattgacctttgtgcatcttggcttagatgtgtaaaaaatgcttatctgttgagggagaaaaaaattcaacattgtgatggtcgttgaaattaatctgtttgtgtcataagatttgttgcaaacaggcttgtagaaacagaaggaaaataatgtctggagactgtccagggaaaaactgagccagccaggccacatttatatgtgggaagttgtagaatgaaaggcattagtcacagagactgaatgactccaggagtcaatgggtaaagcccccctccatgagcaaggtggtgagcgccacagaaaattgtcataggtagaacacagctggctctgccacctgcattttagcaaccatctgtcaatgaaaatactctataaaatatttcaagagatttattcggaaccaaatatgagtgaccaaaggcccatgacacagcctcgggagctcctgagaacatgtgtccaaggtggtcgggctacagcttggttttatacgttttagggagacatgagatatcaatcaatacatgtgagacgtacattggtgtggtctggaaaagtagggcagctgaaagccggggcttccaggtcatagacacatttaaagatttttctggccaggtgctgtggctcacgtctgtaatttcagcattttgggaggctgaggtggtcggattgcatcgagctgaggagtttgggaccagcctggccaacatggcaaaacccatctctacaaaaaatacaaaaattaggccacgtgtggtggctcacacctgtaatcccagcactttgggagcccaggcaggtggatcacctgaggtcaggtgttcgagaccagcctggccaacatgatgaaaccccgtctctactaaaaatacaaaaattaaccgggcatggtggcaggtgcctgtaactccagctactcaggaggctgaggtaggagaattgcttgaacccgggaggcagaggttgcagtgagccaagattgcaccattgcactccagccttggtaacaagagcgaaattgcatctcaaaaaaacaaaaaacaaaaaacaaaaattagctgggcatggtagtgggtgcttataatcccagctacttgggaggctaaggcgggagaatcacttgaatccaggaggcggaggttgcagtaagccgagatcatgccactgtactccagcctgggcaacagaatgagactcagaaaaaaaaaaaaaagattttctgattgaaagagttatctaaagacctagaatcaatagaaaggaatattttgcttaagacgggttgtggagatcaagggtttatcaaggaagcctccaggtagcaggcttcagagaaaatagattgtaaatatttcttatcagacttaaaaaggtgccagactcttagttaattctctcctgaatcagggaaaagacctggaaagggaatctctgtagaatgtagcttttccccacaagagatagctttgcagggccatttcaaaatatgtcagagaaatatattttagggtaaaatactttgatttctttccatactgtattagttaggctggaacttggtgtcttattgctacaaaaaagtcttacgatgatcagttatgtctgacttccaaaggcaggaagataaaatgagacatatttgaccgccacttcccatcatgacctgaagtagtttttcaggttacctttggaatacctttggccaagaggaggggtccttagtatggatgaggacttagatttttttttttttttttttttgagacagggtctccccagctagagtgcagtggtgtgatcttagctcactgaaacctctgcttcccgggctcaagcaattcttcagcctcagcctcccatgtagctgactacatggtgtgagccaccaacatctggctaatttttgtattttttttagagacagggttttaccacgttgcccaggctggtcttgaactcctgagctcaaagcgatacacctgccttggcctcccaaagtgaagagattacaggcatgagccaccatgcccggccaagaattttatttttagtttacacatccttgctaacttagtaattccttgtgaaatcttggtagttctaactccaatactgtgcatcctcaaaggcatttctgtcaggagcttttcaagtttcttacagggtttctgctgaagtgctacaccgctgtttgttatgtaaaatgtgcataaaaacatttaccattgtaaccatttttaaatgtagagttcagtgtcattaagtacattcataatgttgtgcaaccatcatgactatccatgacttgcgatactgaaacaaactccatgttcctcttcccctcagcctctagcaaccatcattctaccttctgttgctgcaaatttgactactccaggacctcatataaatggaatcacaggctggccaccctggcttatgcctgtaatcccagcattttgggaggctgaggtgggcagatcactttgaggtcaggagttagagaccagcctggccaacatggtgaaaccctgtctccactaaaaatacaaaaattatccgggcgtggtggcacatgcctgtagtcccagctgctcaggaggctgaagcgggaggattgtttgaacccaggaggtggaggttgcagtgagctgagatggtaccactccactccagcctgggtgacagaggaagactccatctaaaaaaaaaaattttttttaaataaatggaatcacagtatttgtcttttggtgactgtcttatttcacttagcgtaatgtcctcaaggtatatccatagcatactatgtgcctgaatttctttgttgtcattgtagtgtttttttgtttgtttgtttttctttttggagacagagtctctctctgtcgcccaggctggagtgcaatggcacgagctcagctccctgcaacctccaacctcttggctctgatgaatcatgctgctatgaacatgggtgtacaggtatctctttgagactgtgctttcagttctcttgagtgtatccccagaagtggaactgatgggtcacacagtaattctgtttgattttcttttttgagatgaatgctccgtatgttgcccaggcgagtcttgaactcctgggatcaagtgatcctcctgccttggcctcccaaaatgctgggattacaggcatgagccaccacgcctggcttctctgtaggtttgaattgcatttttcctaatgattagtgacattgagcatcttttcatgtattagtggccatttgtatgtattctttgtagtaatgtctattctagtcatgcacactggtgttaacttaatttttgttgttttttgtttttcagttctaatctcattttagcaaaaacttacctttttaaatatcctgttgcattgtaacatatacttaggtccacaaatctgagctcagtgaggattatcccataggcttctttgtttttcgtgtcagtcaatgccaaatcaaagccctttgggctggtggtttctgtagaaccaccctgattcagtctgagggcaaataatctcctacacttcaggctcacagattcatctttggctcatgctaagacatgtcccgaggtcatgtagttgaatggcagctaaacttatctgagttgtttaaagtattttctccccagtggcttagagttgaatttggataaatctgctctctgtacagtgtaaccacatttggcaggtgctcaataaatgtttgtggagtgaatgagagagatgaaaggagacatcaggatgggtatgtctggtgaatgtggctttctccttccttggagagctgaccattgacaggtgtgccagtttgttacagctgtgtgacaaacaacccaaacaacaggcatcttattgtttcttgtgattctgcctggttgggctcaactggatggttcttctgctggtatcgcttggggcctcttgatggcaggtagggctggaatgtttaatatgtctgcatttatgtgtgcagcccttcggcagggacactgagttgtctggatctctctctctctctctgtgtgtgtgtgtgtgtgtgtgtgtgtgtgtgtgtgtgtgtcagtcttccacgctatggcctctgaagctcaaagctcctagaatcacaggtctggaagttgccagagctgtaacttgccccacatcacttccactgcaggcccagatcccaggggagggaaccttgcaggggtccagacactgttgctgtggccatgggttcctcttgcctgagctgatgctgaggtttctcccatgtctcccagatgctcagtgacctccaggagtctgtggccagctctcgcccccaggaggtgtcagcatacctcacccgcttctgcgaccagtgcaaacaggacaaggcctgccgcttcctcgcggcccagaagggggcctaccccatcatcttcactgcctggaagctggccactgcaggtgaccagggccttctgctccagtccctcaatgccctgtcggtgctgactgatggacagccagacctcctggatgcccagggcctgcagctcctagtggccacgctgacccagaatgctgatgaggctgacctgacctgctctgggatccgctgtgtgcgtcacgcttgcctgaaacatgaacagaatcggcaagacctggtgaaagctggcgtgctgcctctgctgactggtgccatcacccatcatggccaccacactgacgtggtcagggaagcctgctgggccctgcgtgtcatgaccttcgatgacgacatccgtgtgccctttggccatgcccacaaccatgccaagatgattgtgcaggagaacaaaggcttgaaggtgctcatcgaagccaccaaaggtaagagctgggggccgacacgagccagcgaacaaagtgggcgggtcagatgtgaccagagtgagggtcagggctcaggactgctttaggcacggcaggctcaaggctccactcgcccctcggcttagacctgcctgcatggcagccctcgtgaagagtctccccatgttttctagtggctccaggagaattccaggccagcactcaggggccaggagcaggccacaatcccatctctggagctgtctggggaaggggcttgctgtgtccaactccaggggctgagagtggggaagggggacctccccagagggaaataagaggactcgggggggctggctggcatgcaccatggcagtctcagctggatgtgtacacgcttgatcatattcagccacaaatccttaggcatattcatgtgtctggctccagggtgaccatggtgagccagccctgggaggtcacagtgctgaccgtcagaccctaaagcttctgtcttaacccctacccccatcccatccactgaacccaccagaaaagtcctgattgacacacagaaggtgttaggaggatgagttcccctttcttgcctgccccgtcactctggttctgtggccaggcctgtgtgggggttctggctctgtctgctgaggagatgggcccacctcagtctcccttccacacctccagcaaggctgaaaatgagtcccgaccttctgcaaagtcaggctgcttttccaggaggtagctcacatctttcctgttttatttataggagctccaatcagttaggtttctgccagagacaggatatgtatatatgaagagactttttggtaaggaatgggatcatgcaattatggcaagtctgtactccatagggcaggctggaaacccccaggcagtccccttttcggggaaacacctcagtttccttctaaggacttcagctgatggaatgagtcccattcacattgttcaaggtcatctcctctacttaaaggcaactgggctgggcatggtggctcatgcctgtaatgtcagcactttgggaggctgaggtagaaggattgtttgggcccaggagttcaagaccagcctgggcaacatgatgaaaccctgtttctactaaaaatacaaaaattgctgggcgtggtggtgggcacctgtaatcccagttacttgagaggctgaggcacaaggatctcttgagcctaggaaggagaaattgtggtgagccaagatcacgccactgcactccagccttggtgacaaagcgagactctgtctcaaaaaaattaataataataataataataatagatagctgattgtggatggtaaccatgtggacagaatacctccacggcaacacctagattggcattgggtggaactgcagagggctacaggtggtcacaggaactgaccgtcgcagccctgtgtaggtgcaggatcttcgccctcttggcgtgagtgccggcacctgcttcctggtgcagcgcctctgggctccatctgcggctcctgtgttcagttttggccacgtcagcccagtccgtatgtgtccctctatggttctggagtttcctgttgcacttagagaagccattcctaccccatgatcataaaaatagtcttcagatgtctttttttttttttgcactattatagttttctttttttaggtgagaccatgagttggtatggaatttatttggggcatgatggaaggaagcgggttggggggcacattcttaagtcttcccagcagccagcagggggcactgcaggcccaggtagcccctggtgttccctggggccttcctggtgcccgtggccactccaataggcagaagggctggactcttccagtggagcaggatctccaccaaaacagagggccctgcggctggttcttcccgcccccaccaccgtctccctttctccctgcagcgttcctggataaccctggcatcctgagcgagctctgtggaaccctgtcccgcctggccattcgcaacgagttctgccaggaggtcgtcgacctcgggggcctgagcattctggtgtccctgctagccgactgcaatgaccaccagatgagggaccagagcggcgttcaggtatgaagtccccctggcccattgcgtgctgtccttctgggtcccagtcaaccggacgagctatagtcagaacaagccagccctgcctgccagtgtcggaaccaaagtgcagtttttcttttcacggacccaagggcaggaaccaaaggtcgggggggaaacaaacccacctgctctcccttattgtccttttgcaccaggaaaaggatggtaggaagcatagggttggggtgtgtcggccaaggctgggatacttgggttagttcccgcacctctgcctcagtttccctagctacagaatagagcagtgtccctactcattactccgtttagcagccgattattgagcccttctccatgtgcccatccacagcagggagccaatcaacaggtgcctccctatccagctgcagctgcaggaaagcccccaggggtgccacggtcctgcgcccccaagcccagctgttgacgtcagccagcctctttctgtgcaagtggccaggagctgaatgggaaccaacttcagcaaatgaagggatacattttgccctgtactcctgggcagttgggggcagggtcctcaggttctccatcgggggatcagcagtcccagtagcacctcatccactgtcctcagtgcagggcagttagcgcctaccctgggtctgtggccgtggacagggggaccctgtgctctgaaggccggcctgagtcacatgcccccgctgcccctgtcggggtaggggatcaagtcacctggatggtaccgtttggacacaggcagcctgagccacaggcatctgccaccccttctcgttagtcacaccctgcagtcacaccatacctgttggtcaaacagcaaaacagccccacattctccctcagagccctctcccacaaccagcggcctggctggaggtgagcgggcctttcccttgtgcaggagctcgtgaagcaagtgctgagcaccctgcgagccatcgcaggcaacgacgacgtgaaagatgctattgtccgtgctggtgggacggagtccatcgtggctgctatgacccagcatctgaccagcccccaggtacccacctcggggggcacacacagtagcagggtggtggctggagtcccagttcagtttctgtatctgcatgaagctctattcccctgcagggccagggcagggctggtgagggtcgtgggcattggctctcaaatgctgacctgcgtatgcatgactttgggtgtcctggagttaccaccagcaccctgcaaagatctgaccaggcctattgcccttgtcacccctaagagctgagctgatatttttgtcaccctgccattattacacaggagttgccagagacccacggaggggaggccgcagggtgttcaccaggggttggtggccatggcaggatgttgtggggggtctatctgctgcatctcagcctttctgtgactggcccctgcaggtgtgtgagcagagctgcgcggccctgtgcttcctggccctgcgtaagcccgacaacagccgcatcatcgtggagggtggcggggctgtggcagcactgcaggccatgaaggcacacccgcagaaggccggcgtgcaggtgggcagggcaggggatgggggcaggcaggctggtgtgggatgtgcaggtaggtgcagagagggcatgggagcaggtgcggtgtgcgggtgggtgatggggcaaaggctcagtccctatccctatccctgtccctgtccctcccacagccgagccccatagggccaacttctttctcatcttgcaaaatgtgctgaattctgccttcatttgcctccttctctgcctttgttttttctgcatttactctccttttttggggagggggtagtttggaggggctttctggtgaaaccctggaaagaaagctataacacgtaatctccttctgtgggttttttttttttttttttgagacagtctcactctgtcgcccaggctggagtgcagtggcgccatctcagctcactgcaacctctgcctcctgggttcaagcgattctcctgtctcagtctcccgagtagctgggatcacaggcatgggccaccacgcccagctaatttttgtatttttagtagagacaaggttttgccatgttagccaggctggtctcgaactcctgacttcaggtgatccacccacctccacctcccaaagtgctgggattacaggtgtgagccaccgcacccttaatctccttttttaaaagtccctatagagagatctggggagaaagaagttggggaagcgtggatggggatctgcctggggtttcagaaaggtttctgccccctccttgggctgctggtctgagttctgagtgtgggacaccctgtccacacctccctggctgaacccagactcctccgtgcagcccccggggccctcctcgcctcctcactcccagcataggattcttggacacaccaggctgggacccacagggggcctttgctctcgctggctcttactctgggacactgacccttacctggtctgaccccttgtccacttctggccaccctggccagcagttccccactctgcatgcgcttcccacctgctgtcctgctggtggtgggagccaccctgggaagcttccaggcagtgccccgcgcccacccacagcaggtgcacagggcacaaatgtccactgaatgggtagggatgtaattgacaggtgcctgtgcacaaccactgtcttcccgtggcctcactgcccccttgccctagggccccttccttggctctgtgccagcctcgggggacctcaggctcaccaactctgaggctgagagttccaaagccataggatagatcctggagcttccctgagcctgtttccttgcctgggagttagccatgccttgtggggctgccaagagggtaaagtagagagatgggtctagcttgatacagtataggcagctgctggatgtcagctgtggttatgatcacctccatcttgttatgatgaagaccctgaggtcagagtggaccccaccccaaagccccatctggcagctcacagctgctctctcctacagaaacaggcttgcatgctgatccgaaacctggtggcccacggccaggccttctcgaagcccatcctggacctgggggctgaggcactcatcatgcaggcccgatctgcccaccgtgactgtgaggacgtggccaaggccgccctgcgggacctgggttgtcatgtcgagctccgagagctgtggacaggccagaggggcaacctggcgccatgaccccaggcccagtctgggccgtgactctgggtgagtcgtgtgactcaggaatgggggtagatccatgtcctccactgtcccccattagttctgtccccttcacaatgagaagtgttttctggcaggccctaggtaaagggtcgggggaggggggagccttgtagggaggcctctacacagaagaaagcagcccccatgtcccagccacttctgggtcccagccagcagcacggatgttactgtcctgctccttcccccagccccacgccctaccagagggggcaaagggcacgtcccatcactcactgccctgtctgaaatgtggcagccactgtgggccaggctcagggcagggcaggcgattccagtggggttgggccccctggcgcctgctgcttactgcagtttcatgcaggcctctgctccttgtctttcttacctgtaaaatgggtctcagatgctccgccctgcttggccccagcttgtctgtctctgggtcctgggccagccaggatacctgataataaaagatcattgggtgaacagcggaggggtctcttccatagcttggctgagcatggggggccacagtcagtggcctcagagtgtgggggagagacagacattttggtggggggggccatggagtcactgaggatagcaaaggggttttgggaacagccagggatctaggatctgctgtcaccctcagacaggcaggcgctgaggccatggtcaggatcactgtttctgacgtgtaccacctgcagggccggagggctccacgttcatcccctactcagctctgcggccttgagcaagtgaaagaacctctccgagcctcaatatgctcctcctaaagtgaggagtggggcagtgatagatcgccctctgagaggtgttggaccaggctgagcacatggagggtgtccagttgtcttaggctgggtgtcctaggtacccaacctcttgtctctgagcctcgatttccccatctataagatagacatcggcgggcacggtggctcatgcctgtaatcccagcactttgggaggctgaggtgggtgggtcacttgaggtcaggagttcgagaccagccttgccaatatggtgaaaccccgtctctactaaaaaaatacaaaaatcagcccagtgtggtgacgtatgcctgtaataccagttacctgggaggctgagacaggagaagtgcttgaacccgggcagcagaggttgcagggagctgagatcacgccactgcactccagcctgggcaacagagcaagactctgtctcaaaaaaaaaaaaaaaagacatcattgttgttgccctcagtgaccaccccaccccaagcattctgggggtgcccagacagctgtggccctgcagaccccagctcttctgctctgaagtcacactcagaggtcacaccgtggtcactaggtggcttgtgcatctcttgtggcctcacgggggtccgggcagcctcatgaccactggtgtgtgccctagccttcctgcccacaccttggaggcctctcccctcttggaccctcgcccctgcttgtcatgtgcctccccgagccccaggatggcctgggctcagtccttgacctcagggacactcctttcccagcaggcccccagcttccgtggaatccagccgatgcaaacagctgaggagcgtcaccctggctgcacctctccgtggtgtccccgtctcccctgcccccagcaggaaagggtgctctcagctcagcagggctggcccaaacctctgacccagtcaccccgccctatccctcctccctggagactcccaggatgtgggagaaagatctcgaatctgccccagactgccctgacttaacttctgggccagtgtgaccttgggcagttctcaagcatttcttcatctgtcatgtggcggggtaggtgctcctgagctatttcgaggacggcctgcagtgctggccctgtcattcctgctccagccttgctctcagtctgcccatggctcccctttgccttctacataaaaccaaacctgtctgtggtcccagcaacttgggctaaggcgggaagatcacttgagcccaggagtcaaggctgcagtgagttaggatggcaccactgcactccagcctgggtgacggatcaagagcttgtctcaaaaacaaacaaacaaacaaaaaaatgcacttcatgccctgcagacccagtatggcccaggccttgcccatttcccagtctttccactgtactcactccctattcccccaccccagggcctttgcacaagcccccatgtgacaagccatgccctctgcctagaagtgcccttcccttggccttccccgtggccggctcctcctagcacatgaggtttcagctcacgttgccttctccaggagagacccccatctcatcacctcatgtgctctggctctgacactgggccccatctgaggtcacctcatttgtgaactctcctgtttgtcttgcccccaccatcggctggctccctgcagggaggcccctgtccccacttgctgtgccttcagcttcccgtcagtgtttttgagtgttcacctgaataaactgacaagcactcgaggtccctgccaggtggccccagcgtcctcccctgggcctgggccaagctgcaggcttcttcaggaaggggtggttctgccttatctgtccctcccaccttagcccaaggaagtgggtgtcttcagtagatgcagctagcatgtttggacagcctcaggttgggtgggggcccctcaccaaagatctcacatttccctggggttatggcctggctttccatcccccctcggccacttcaggcatatcacctcccgtctgtgagcctcggccttctcatctgaactcaggctagatctggcacactggagggccacagcccctagaaaggcgcgcttcaggggatgtccagaacataactccccccagcccccatccccgtcgccttcccttttctgtcacccaggctggagtgcagtggcgccatctcggctcactgcaagctctgcctcccaggttcacaccattctcctgcctcagcctcctgagtagctgggattacaggcgcctgccaccacccccggctaatttttttgtatttttagtagagatggggtttcaccttgttagccaggatggtcttgatctcctgacctcgtgatccgcccgcctcggcctcccaaagtgctaggattacaggcgtgagccaccgcacccggccctggccttctcttaagtagcttttgctgtcctccttgatgacatcgagacctgggctgaggtggagcctgctgcaaggatggtgcgagtgtgttcaggccacgcctctgctactgtaggctcttggtgaagtggcctgacttatctgagccttgggaggtgaatgaggccactctgaccccagccaggcttggttgttgtcactgctgtgttcaggatgtctccctccagccagggatgggcttgggctcctgggaaaggaacacagattttttctgttgtgaacatacatctcccagaggctggactaaacctcattttccagataggaaatagactcatgggcatttgaggggctgcggtgggatgagaccacagcttggcctgcctccaggcccctcatctttttccaaagctgttaacctgaccttgggcaaaaggcctttgggcctcaggtgattaggcctggacgctgtgccagggcctggctcacagatgattcctgggatccccaagaggtagaggagactggagggcgaagaggcagtgtcctgtccagggctggccagccaaagcagaagagccgagatcctgggcaccctagctgggcttacatgagtgcccatggtgggggtgtccattgctattgccaaggtgctttgcctgccattgctggaaggcggtagggaggttggctggcgccagcctgctaaagaacgagcagaagctagagaggcagccccaggctgggccagagcctgacctttgccttagttggctctgtccctggaggcactgtgggaccttccaggagctttgttacctccccctcccagggcctggcaggtgggcactgggagtgggcgctcctcggcgtagatatctccctcttggtgtggcaagccacgcccatagttggtctgtgtccatgaagcgctatttacagagagggaaacaggcccagagaagaacaatatatcatcaccagccttccatgagtgcttactgtggacgaagccattgtaagtgttttgcttccatttcatcaatgctcacatcagccctaggagacagccgggaaactgaagtggggagcttgtgttatttgctgaaggtcctgtggctgttactggccattacttacgttaaaaagagcagggattcaaactcagccctgggtccttccaccaaggaatattctccaccataggctcagttttcttatctgctaagtgggcactgtcacgtccacctggaagtgaggtggggagatggtattggagaaagcccagtggggacctggcacccaattgatgttcaactgacctcagcttccccctcttctctggagggcagaatggaggccagatcctggaagttgccaggaagcaaaccacaggtgggaggtatgggagaggaggtccaggtaggcatatcgtgagaatatcaggagtttgatgatggccttgggctagtgatttcccgtcacatcctccccatttgaaacttgtggatcacacacttagcaggggcttgtgcagccctgaaatgtgagccctttctaaggttggtttcagccttgctccctcccaggattccctggttctgaacttgatctccaccaaccctggccagcacctagaggaaataagagctggtatctggaaacatttgtagccctctccatcctgaagatgaagggtgagtcatagaacagagtggcttcgggggaggtgccgatgacacagccatgcctgggatggcaggtgtctccctaaactgccggcatttttctgcacttcacagaggagctgaggctcacaggccgcacatgacctgctcagggtcaaatgctttcaccagataattaaaatgagagctgagttgtaaattttcccagggaagcaaccccagagaggaaagatcaaggcataggaatcattttcccccctcttttccaaatgaaacagctgaggctcacaagggcttttgcccaaggttgtgtggtgggccagtgattggacaaggattcaaacccaggtctctgaggcccccagtggctcttctctgacacactctttccaaaaagcaggctgctctagattcattctctggtttagcaaccagagaatgctgtgtaaccttgggcaaggagcttgacctctctgtgctctggtttctgtaaaaggagccagtggtctctctgacctcatgggattgtggttaagattcagttaattcaaaaaaagacttggcagggagaaggcccaacagggatgtcactggataccgtggcggggaaagctgggacgcagagaggtcagacactcagaaaaccacgcagcgcgtttcagtaggattccgccccttatttccatgtcttcacaccacctcgagatggagagggcagttcagagtgacctccagcgaatctgccctctccgtgtcgtctgcaggggattagtggggagtaaggggatagagaattatccaggagtccttcagccttgatggtccaagttcacatccgcttctgtgctaggtggccagagggcgggctctacacgagagcctcaggggaccctgcgccaggcgtccgaggccacgtcgggttgccgcgctccgggtcggactgcaccttgaacgctccagccctcccctgggggcgtaccgcccacggccgctgcgactggccgcggggcctgccagtcttcggctttgcggccaatcccggtctccccccaagctacgccctccgttcctctcgcctctgccccaccggtagcgccagtttcttcgtagccccgcccctggcccccagcgattggccgacagttctgcctgttttctgccaagattccaatcctcgcctgcctccaggccctcgcctcccagcgcctagcaccctgagggaccactcaggcaccccaggcctctcccaatagccccacctctgccaatcagcgattggctttaggggctgcccatctgcttcatactcgccaatcactgtcgcttccagcgctgactggccagggagcagccaatcggggcgtggcgtggacccctcccgtggcgcgctctgggggtgcgcgaggcggggccgtggcggctggaggtagcggcggcggcgacgcgtccgggccggtgagggggcgcggggggcgccgggggggcccaagcgtcagcggcccgcgcctgtcgggctgaactgaggtgaggcacgggtcctgtcatggatcccggggcgaggggcggatgaggcggggcatgacagtagcgtcgcgagggcaggaagaggttaaagaccccccccaaccccacactccacgtctactgccccctgggggctactgcatccaggtttgagcccgtcacccgcagtccacgcacgcctgacaccacgtcccttttcgttgacatcccccatacactttagactgtccttgctgacatctcccacacccctggggccttgtccccggcgccccgcacagctgggtctgacatccccctcacacacctgacaccgcgcccccactcacgaacacccgcccccactcacgaacaccccccacatcacctgagtctgtccttgtcgatgacacccccacacccacacctgagcctgtgactcctaactcatggcctcgcaactcacacctggacctagtcccgtcccccactgcctttcctcatatccaggtatctgctcgctactctcgtgcccactcccccagcaacctgtgtctctcttctcagggaccttccccctggcacctgccctctgccctggcagccccacacctctgtctcccccttttctctctcccaccttgggctttcttccacgtgcacctgtgttcgcacaccctctgtaataatccccccgaatcccccaggtcctccaatagtcccccaagccttggtatctcaggatcgctgcaccctcccctccccaaacaaaagcttaccccagtgttcatttctaacagtgcttgacagtctataaagtgatttccggaccttagaataatcccatctgtcagaccaaaccggaatcatctccattttaccagccacagacctaaaccacttgaatgctagaggcagagcctattctaccctgggcatcgctgaccctctgctgtggacccaccgcgtttgggcccatctgttatgtttatctcagagggattggcaggagtcgtgactttgactgggtccggaaaggcttagctggaagggacggcccctctgccaagcgtgtgtctcggagtcctggggcaggctggcggtggagacgctgccggaggaggggggctcatcatcttgggtgcctcctgcaggatgccggagagggggttgccggggccggggctcccagctcttgcagacccgggacccctctccgacactccctgggcccttgaagccgataaagagtaaggaaacactctttagagtgaggcaaactaatgtttcagctgtttaaagctaacctgcaaaacgagcctgggtggtgctaggaatgattcttctggaattttttagttcccttgagtctgatttgcaagcatgcagcatagaaggaggacagtggctttgttgttgaaaagcaataacgtgccatttcctgtaaggctcctggagcgtttcttaccccctcccaccgctccctgcaaagacggtaccagaatgtttcagagggtcatgtcaccttcagcttctcctgtggaaactgaagccatttgggttttctgtccaacttcaataggagtcatttaaaacatatatgggcatgtatgtatatatgtatgtatatgtgtgtgtgttgtacacatatgtacatgtacctataatattcatatgtttatatacatattttatatatacatatttcgtgtgtgttatatatgtacatgtgtataaactttggcaagatcattgagtatatagtttttgggttttttttgagacggagtcttgctctgttgcccaggctggagtgcagtggtgtgatctcggctcacggcaacctctgcctcctgggttcatgcagttctcctacctcagcctcctgagtagctgggattacaggcatgtgccaccacacccagctaatttttgtatttttaatagaaacggggtttcaccatgttggctaggctggtctcgcactcctgaccccaagtgatctgctcgcctcagcctcccaagatgctgggattacaggcgtgagccaccacacccggcctattatatagttaaaaagaaaaaatcaaacagtacaaaaggtcacatagtagaaatcagtcaggtcttccccagcctgtaccccgttcctcctcagatgcacctgctgttgataatttcttatgttttcttccagaggtagtctatgactggggtggcagaaaggggtcgggggaggtatatatcccccaccccttttaaaccactggtaaatttgcattgagcagacatatgcattctaaggccagtcccttactgatggctgtttaagctgcagcccatattttttttttctttctttttttttttttgagttggattcttgctctgtcgcccaggctggagtgcagtggcgcgatctcggctcactgcaagctccgcctcccaagttcaagccattctcctgcctcagcctcctgagtagctgggactacaggcacccaccactacacccggctaattttttcatatttttttagtagagacggggtttcactgtgttagccaggatggtctcgatctcctgaccttgtgatcagcctgcctcggtctcccaaagtgctgggattacaggcgtgagccactgcgcccagccactgcagcccatatttagcttttacaaacagagctgcaatggatagatgcatgcatcagcatgtactaaatacacattgaacgtatttgggctccagccgtgctcagacacttcagacccccctgtcttgctggccatgcctgtagtccacagttactcaggaggctgaggtgggaggattgcttgaaccaaggagttcaaggctgcagtgagctataatcatgccactgcactcctctccagcctggacgacagagctagaccctgtctcaaaaaaaaaaaaaaaaaagggccaagtaaaagggcatattcctcctcctcctctcaactgtgaagttggaaagcctgattcctctcctgtggccagctcagttatcttactatcaagttttgtggtctgtcccatctgataggtaaaaaacagcacaagagatccttttgaacatcacttccatgcttcctacccctgtcttaggtgttctggcttgtggggtagggattaaacattagacttgtttctctgccagtcagactaaagttcaagaaatatttggggctggatgcagtggttcacaccacccaacactttgggtggatgaggcaggtgtattgcttgagcccaggagtttcagaccagctcgggcaacatggtgaaaccctatctctataaaaaaaattttaaaattagccgggcgtggtggcgtgcgtaaatagtctcagctagttgggaggctaaggtggagaactgcttgagcccaggagttcaatgctgcagtgagctatgattgcaccattgcactccagcctgggcaacagagcaagaccctgtttttctgttaaaaaaaattttttttgagttcctgctctgtgaagcttgtccctatagcagggagcagtggtggtgctgagattttggctcaaggtacctcaacaagaacagttgctagaagaaccatttagctgttgctgatttttttttttttcacttgggtctaggaaaagaaagatgagggcatcatgagagattgagacgagtcagatgttaaatctgtctgggaagctgtttcgagactctctccaattgtccaatttctcaccactggtgccagatggagggtgtcgtcatactgaagtcaggcctctgcccacgtgtcatacagttttttttgtctgtctcttctattttggcagttagacattaagaggggattattgagataatcagaatcattcgctcgtttgggttttgcaagacagagcttttaaaagtgcatttgcattttttattttaaacatgaaatacttcttcataaaaagtatattggccgggcacagtggctcacacctgtaatcccagcactttgggaggccgaggcgggcagatcatgaggtcaggagttcaagaccagcatgaccaacatggtgaaaccctgtctctaccaaagaatacaaaaattagccaggcgtagtggcatgcgcctgtaatcctagctactcaggaagctgaggcaggagaattgcttgaacccgggagttggaggttgcagtgagctgagatcacaccatcgcactccagcctgggcgacagagcgagactctgtctcaaaaaaaaaaaaaaaaagtatatcatgtcgggccaggcatggtggctcacgcctttcatcctagcactttgggaggccgaggcaggtggatcacttgatgtcaggagttcaagaccagcctagccaacatggtgaaaccccgtctctactaaaaatacaaaaattagccgggcatgttggtgggcgcctgtattcccagctactctggaggctgaggcagggagaattgcttaaacccgggaggcggaggttgcagcgagccaagatcgtgccactgcactccagcctgggcaacagggcaagactctgtctcaagaaaaaaataaaaacaaaaatagccgggtgtggtggtgcatgcccatagtcccagctactcgggagactgaggcaggagaatcgtttgaaccctggaggcggaggttgcagtgagctgagatggcaccactgcactccagcctgggtgacagagcgacactcagtctcaaataaataaataaataaataaataaataaataaataaattagctggccttgttggcatgtacccatagtcctagctactcaggaggctgaggtgggaggatcacttgagctcagggggttgaggctgcagtgagccatggtttgtgccactgcactccagcctgggtgacagtgaggttctgtctctttaaaaaaaaaaaaaaagtatataacatgtatgtgaaaagaaagaagatttaaccaataataaaattagcacccaactcaggaagtagaacgatgtcccctggaggccccaccctgttcacagagctatttttaaaatatgcttgtcaacatttgttttcttcactgagcaccttttgctactaccatcttgggcagaatgcttggattccaggggctcaacaaagttctctgctggccagattttctgctgagctctctgccagcccagcagcctgtgaggttctggcaggcaaatggctgaggacaagccaccagctgaggggcaggccaacacttggaggcttggcctcagatccctgcatattcgtttcccgtggctgccataataaattaccacaaactggggggcttcagacaacagaaatgtatcctgtcgtagttgtggaggcctaaagtccaaaatgaaggtgtcaacaggactggttccttctggaggctctgagggagtccttcccaggcctttctccgggcaaactttgaagttcttggctcgtggctacatcactccagtctctgcctttgtattaatgtggctttctccctgttgtgtgtgtctttgtgtcctctattttttctttctttttagagatggggtctcactatgttgttcacgctggagtgcagtgatatgatcatagttcactgcaacctctaactctttggcttaagtgattctcccgcttcagcctgctgagtagctgggactataggcgcaggccaccactcctggatctcctcttctttttttttttttttgagacaagctcttgctctgttgcccaggctggactgcagtggtgcgatcttcgctcactgcaacctctgcctcccaggttcaagcgattctcctgcctcagcctcccgagtagttgggattataggcatgcaccaccacatccagctaattttattttttatttttttgagacagagtcttgctctatcgcccaggctggagtgcagtggcatgatctcggctcactgcaagctccacctcccaggttcacaccattctcctgcctcagcttccagagtagctgggactacaggtgcccgccaccacgcccggctaattttctgtatttttttagtagagacagggtttcactgtgttagccaggatggtctcgatctcctgaccttgtgatccgcctgcctcggcctcccaaagtgctgggattacaggtgtgagccaccctgcctggccattttttttttttttttttttagacagagttttgcccttgttgcccaggctggagtacaatggtgtgatctcggctcaccgcaacctccacctcccaggttcaagccattctcctgcctcagcctcccaagtagctaggattacaggtgcgcaccaccgcatccagctaatttttgtattttcagtagagacacggttttgccacgttggccaggctggtcttgaactgacctcaagtgatctgcccaactcggcctcccaaagtgctgggattacagatgtgaaccactcccggccgatcccctcttcttataaggacactagtccttgggtttagggctcaccctaaatctcaaggtgaactcatcttaagatccttaactgattgcatctgcaaagaccctatttccaaagaaggccatgttctgaggttccaggtggacatgaatttgggggatgtcattcaacccttatacttgctgagctagttatttccaacaggacattattaagggaaatgcttgttcaggtacctctgttacttcaggaagaataggccaatggggtcggacacattcctcagcccctccagatggctcatgttggcagctttgcttactcacctgtctccctcggaaggtggaggcatccagatgctctaagccaccaaggacctgactagtgaatgcataccgtctttttttttttttttttttaatacagggtctcactttctcactttgttgctgaggctggagtgggagtgtggtggcaagatcacagctcactgccacctcgaattcctgggctcaagtgatcctcctgcctcagcctcccaagtagctgggactataggcatgcaccaccaagcccggctaacttttaaattttttgtagagacagggtttctccatccttcccagactggtctcaaacccctgggttcaagccatcctcccgcctcatcctcccaaagtgctggaattagaggtgtaagccgccacgcccagctccaagtgtgtacatcttaattttgctttctgggctgtgagcttggtcctgtgattatctcctgttgatacctggtctcagaaggatggggagcatggacacacatcagaccaccaccaagtgattggagttccatattggtcagtcttgaggagaagctggggtgctacggtctgatcttcagggggccagggagattttcaggaaactctgggagatctgaagctaatgaggaattaactacatggcagagccaagggctagcagaaagcaaaattagggctggtgcggtggctcacacctgtaatcccagcactttgggaggccgaggtgggcggagcacctgaggtcaggagtttgagaccagcctggccaacatggtgaaacctatctctgctaaaaatataaaaattagccagccatggtggcaggcacctgtaatctcagctactcaggagactgaagcaggagaatcacttgaacctgggaggcagaggttgcactgagccaagattgcaccactgcactccagcctaggcaacaaagcgagaatccgtctcaaaaaaaaaaacaactaaaaaaataaaaataaagggatgttctttgatgagcagcgggacaaatcatctaagttttgtttcacattgtagggagattaacctgtggggggatgctcagactggcatggggcgacccaggatgaatgagggtcttcaggtggtgagattaggcaagtgggatcttgctgtgttgcccaggctgatctccaattcctgggctcgagctgtcctcccaccccagcctcccaaagtattggaattacaggcgtgagccactgtgcctggcgaatgtgtacatttcaatcatggatcatggggaagccatgtgtcagtgtctcaaaagcatactcaataggccggggccgtgttaaatgggatttgccccagccctgtctgattccttattagggagaacgatacttaccaatacttgtcacccactcgagtggcactatcctgtgaagatggtgacagatgaggaaatcaaggaatggggaggtttattttttactttaaattttttgtttgttttttcagagtctcactgtgttacccaggctggagtgcagtggcctgatcttggctcactgcagtctctgcctcctgggctcaagtgattctcatgcctcagcctcctgagtagctaggattacaggcgcctgccaccacgcctggctaatttttgtatttagccaggcgtggagacagggtttcgccatgttggccaggctggtctcaaactcctgacctcaagtgatctgcccgcctcggcctcccaaaatgctgggattacaggcatgagccacctcactcagccaaaaaattttttttagagacagggtcttgttctgttgcccaggctagagtgcagtggtgtaatcacagcacatgcagcctcgacctcctgggttcaagtgatcttcccacctcaacctcctgagtagctgagactataagtgtgcgccaccatacctggctaatttattttgtagagacagggcctcactctgtcacccaggctggagtgcagtggtgggatcatagctcactgaagccttgaactcctggcctcaagtgatcctcctgcctcggcctcccaaagtgctgggattacaggtgtgacccactgtatgtggcctatgtggaggtttagtgacacatccaaggtgtcacatgctagaccccatcatcccacaacacagtgtgtggtggcagggagcctgtgcatgctgctgtgtggctatgaggaagagaatgattgaagtggtgcattcttgctgctgtgggagggatggctgaagagcaggaggacaggacagcaacaggcaaaagcacctgtctgcagctgttatgtttctgcttccttgctgggcatggacactgagtgtgacatggacccttgccttccagggacccctgccttccagggacccccagcctggttgcagggaagcaagtggagagtggcccctcaagtgcagcagagaaccacagactgctcagtgcagggcagagcagttaactttgggggcagtgaggccaggacatttaggagctttgaaggatgcagagaagtttgccaggatcggagactgcggccaaagcaaaacttggcatgtccagggaattaattcacttgtccagcaaatagttgttgaaggccaatcaaatgcggattgctgtgccaggttccgtgtggtaagaacatggggcttttttttttttttgagttgaagtctttcaccatcacccaggctggagtgcagtggcatgatcttggctcactgcaacctccgtctcctaggttcaagcaattctcctgccccagcctcccgaatagctgggattacaggtatgtaccaccatgctggctaatttttgtatttttagtagagacggggtttaaccatgttggccaggatagtcttgaactcccgaccttaaatgatccatctgccttggcctcccaaactgctgggattaaaggcgtgagccactgtgcccagctaatttttgtatttttgtagagacagggttttaccatgttgcccaggctggtcttgaactcgtggcctcaagtgatctgcccaccttggcctcccaaagtgctgggattacaggcatgagccaccacgcccaaccaaacatagggcttttgaggcgaggacagttactgaagtagaccctcttagtggaggaatgtgagtaccattcagtaccttggattgttttagataacatctaacggcctttggtgacaggtgtgggcagcactgtctgcaaggacagaggacagcaattgatcatagaatttcctggatctttcagggtgtttaacccatagagaccgcaacaagggttgccttaaccaaagattgtctgaaaggcacacaggagcaaatgcagcaggaagaaactccccatttgtgaggcagcctgcggggttggggttaacgggcagcagccattatgtaagatgtgcccggatcccttaggcagagttaatgcttattaactagaaaagaaaacagcctttatcggctggcagataggatgttaattggcttccgtttactgagagattacaggatccatttcacggctgcttataataaactccatccacagagaaactgtccccacccccacccaacatttgtacaaacatttcctgagtcccaaggggtggagctggcagttgtatggtggtccccacaaggtaacagcataaacggtgggcctgtcttatgtctggtcgggaagctatgagacaggctcaagggaatcaggcacatgtgcatatgagtctgtgtgtgtgtgacagtgtgtgtgagagagtgtgtgtgtgcgtgcgtgtatgtgtgtgtgtgtgagtgtatgtgtgagcgagtgtgagtgtgtgtgtatgtgtgagtgtgtatgtattaggatagcctgtgtacatggggcttataggatgcttgggtttgaaattgcctgattcagaacaagaagcagccttgtggctgggcgcagtggttcacacctgtaatcccaacactttgggaggcagaggcaggtcgactgcttgaggccaggagtttgagaccagcctgggcagcgtagcaagaccccgtctctactaaaaataattttaaaattagctgggcatgatagtgtacacccatagtcctagctactcagaggctaaggtggaaagatcacctgagcccaaaagatggaggctgcagtgagctatgattttaccactgcattccagcctgggtgacagagtgagaccctgtctcaaaaaaaaaagaagtagcttgtcctgccctctcccaagcaactgtcaacttgcttggaaccagtgttcccattgctctggaggttctatgctgaggctggtgtgatcatgagttatcgaagatcccatgctccaggttcacgtttcctgaataatgctgcttagtaagtcatttcctatgtcatcctcccataccccgccgagctttgttttttgtttgatgaatggaaagactgcatgaacagaagcagcatgggaaaagatacacgtatgttatttggggctggcccccctctgcctggccgctggtagtcacccttgtggggacacctgaatcccagttcagaaagcactggcatcctaggtactcgcgaaaggtacctagagtgaacgtggcaaggctgggcctcggagccacaggacactgtcatctgtggttgtaaatactatgtggggctgggggagtacgaggtacctaccccagcacagcatacgagtcaggactctggcaggtgcaagtgacagaaacccatcctatgctgactgaactggaaagggtgcttcctgggctccatgacagcaaagtccgtgtgcttttggcaccactggctgccagatccccctagcctgcaggtatcctccttcacctcctggccttgctctgccctctaactctgtgtcaactctgccctgcagtctcacaccctactggcttcccctcccctgaagaaagaggacttctccggcccgatggttccctcaaaagtcccagatcttggtctttgggggcagcaccctgaacctaggggagtgtgaagtctcattacctgaccatggccacctgggtcaccctggagtcaaggggaggatcagccccactttcttctccacagtgacagggagcagagcgagtggtttcccagaatgctgtcctcagaagggatggccactgtgcgtgtggaccaactgtagagcttcagtgcctcctccaggctttcatcactgctaagatcatcaacaggtattctcggccaggtgtagtggctcatgcctgtaatcccagcattttgggaggctgaggcgggtggataccttgaggtcaggagtttgagaccagcctgcccaacatggtgaaaccctatctctactaaaaaaaaaaaatacaaaaattggccagacctggtggtgtgtgtctgtaatcccagctactggggaggctgaggcacaagaatcacttgaacctgggaggtggaggttgcagtgagccgagatcatgccactgcactccagcctgggcagcacagtgagactccatcttaaaaaaacaaaacaaaacaggtgttctccacaggttggaggaaagtgggaaagagcaagctgaacacgtccactcccaaaggccatccattcaagtcccctgggaattacaaatggcttgcctgccccactcccaggtttggcatccattggcctgggagggggtgtggcagaggtgttttgtttgcactgtttaaacattttaaattgagatatagcttacatagaataaagcacataaatcctaagtgtatatatagctcagtgaatttttatgtatatatgcatccttggaaccagatcaagacagttttcaagcccccagctggctccttcctgccccctccctgatataccccctagaggtaaccagtattctaatctttatcaccataaatgtgttttgtacttacgtttcttaaaaattgtggtgggctgtgtgcaatggctcatgtttgtaattccagcactttgggaggcagaggctggaggacagcttgagcccaggagttcaagaccagcctgggcaacatagtaagaccccatctctacaaaaaatttaaaatttagctgcgcatggtggcccacacctgtagccccagctactcaggaggctgaggtaggaggatcatttgagccggggagtcggaggccgcagtgagccatcatagtgccactgcactgcagcctgggtggcagagcgagagaccctgtgtcaaaaataaataaataaaaagtgtggtaaaatacacagtacttaaaagtgccatttttaagtgttcagttcagtggcattaagtacattcacactgttgtgcaaccatcaccaccatccgtctccacaactcttccgtcttgcaaaactgaaactgttcccactaaacagtaattctctgttcccctgctcccagcccctggcacctgccattctactttctgtctctatgaatgtgatgactctagggacctcatataagtggattcgtatggtatttgtccttttgtgactggctcatttcactcagcatgacatccccagggtccatccgtgtggcagcagttatcgacatttggatgtgtataaaacattttgtttactgagcttgactgttatgcagacagaatcattcagtatgcagctgggcacagtggctcacacgtgtaatcccagcgctttgggaggccaagatgggcagatcacctgaggccaggagttcgaaaccagcctggccaacatggcgaaaccccatctttcctaaatacaaaaaattagctgggtgtggtggtgcacacctgtaatcccagctactcgggaggctgaggcacaagaatcacttgaatccgggaggtggaagttgcagtgagctgagatcgtgccattgcactccagcctgggcgacagagtgagactccaactcaaaaaaaaagaatcgttcagtatgcaaccttttgtgcctggcttctgcctcttcactggtgtgtctgtgagatccatccgtgttgttgtcgcgtgtagcagcagtttggtgtgttacatagtgtcccatcgtgggacataccacacacgtgttcccattctcctatgggtggtctttggggttgtgtccatagagtgtgctcatcattgccatgatatgctgctgggcaggtcttcaaagctcccagggctgtatatggggaggctggagggagaggcctctatggcaggtgtggcttgtaggaatcttggctgcactgggcagaagcagaggtctggaggtgggagacccagccggcattgggcggtgggggtactttgtgtctccctacaagcacagcctgcaatggcccacttgcattcagcatgaaggtgcgtatgcctgacacagcctcagcctgtttgtttccctggtcagcctgagctcactccagccttgggttcttccttcttgctgttctccctccctggtgtactccttcccttccagatcccaggacagacccctttcccccaccccatgtccctcctcccacatagactctgtgcatatggtcatccttgtgtgggtcatttgcagtaccgatagagcccgtgaaggtgtgcctccgcagagcatgtacgcagcgagcatgtacgcagcaagcatgcagcaagcacacagagggagtgacatacgaatgtccagcagctaatctaattccaagtaacctagtagggagggaaggatccgtaagaaaagggagacccaaggtcatgaacactgcctgagtcagcccagggtgtacccaggctcccaccaccctgttatcctgccagagcagagaagggcctcccagggctggtgggaacctgggcaggtttttgtatgtgtgtcaaaatgcacataacttgaaagttaccattgtgagctttttttttttgagatgtagtcttgctcttgtcccccaggctggagtgcagtggcgcgctcttggctcattgtgagcgttttaaagtgaacaattcagtggtatatagtacagtcacagtgttgtgcaaccactgccttcatctgatttcagaacttttatttttttatttatttttattttttagacaattttttatttttttatttttaatttttattttttatcttgctgtgtcacccaggctggagtgcaatggcgcaatctcggctcactgcaacctccacctccctggttcaagcgattctcctgcctcaacctcctgagtagctgggattacaggtgcatgccatcatatccagctaatttttgtatttttagtagagacagggtctcaccatgttggccagggtggtcttgaactcatgacttcaagttatctgactgactcagcctcctgaagtgctggaattataggtgtgagccaccacacctggccaatttcagaacattttcatcacccccaaaaggaaatcccatccccatgagcagtcactccccattccacagcccccagcccctagcaaccaccaatctggttcctgtctctatggatttacctgttctgggcatttcatatcaatggaacctcacactatgtggccttttgtgtctggcttctctactcagtatcgtgtttttgaggttcatctatgttgtagcatggatcagtgcttcattccttttcatggctgagtagtagtctgtcatgcgaacattttgtatatccattcatctgttgatgagcagttgggttacttccactttttggctgttgtgaatcttactgctaggagcattcatgtacaagtttcattgttgttgctattgtttctattgtgttggggtctcactatgttgcccaggctggtcttgaactcctagcctcaagcatcctcctgctttagcctcccaaagtgctgggattatgggtgtgagccaccatgaccaaccccatgcacaagttttgtgtggaccctttggttctgtgcctggaagtggaattgctgggccacaatagtatctccctgtgtaacttgtgaaggaacctccaggctgatttccacaatggctgccccatctaacattcccagcatacaaggacaccagtttctccacttgctcgcctggcaggttttagtcagatgcttggcaggatgggtgggagtcaggaggagaacgggtgttccgcatgtgtaggcttgtcagccagcactggggtgggatggtgagaccaactctcagatgaggaggccgaggtcctgggagctggtacacttgcctgagggtgctcatctggtgaagagcagagtgggcttgaatctgtgaccctgccttcaagttcacaatgggaaatgcttcctcagcaggtgactgagggtgaagggtcactgcttgtgccccagcagtgacattttagggataaggacagccccaccccctacccattggatccatgagtaaggagacagaaaaggaaggaggcaaggggaggggctctcacccagaagtacagcgtcctcttccttcatttggaccaggctcagggctcagggttctgctgatgaaataggtccctcccaagccaggcacagtggctcacacctgtaatcccaacactttgggaggttcaggtgggaggatcacttgaggccaggagttcgagactagcctgggcaacatagcaagacctcatctctacaaaaaaattaagaaattaaggctgggcatggtggtggtgcatgcctgtaatcccagcactttgggaggccaaggtgggcagattgcatgagcttagtttgagaccagcctgggcaacatggtgaaaccccgtctctacgaaaaacacaaaaattagctgggcttggtggtacctatctgtggtcccagctacttgggaagctaaggcaggagggtctcttgagcccaggagatcaaagctgcagtgacctgagattgcgctactgcactccagcctgggcaacagagagagaccctataaaatttaaaaaaaaaaaaaaaaaagagggagggagagagggaaattaaccaggcatggtggtacacatgtatagtcccagctattcaggaaactgaggcaggagtttggggaatcccttgagcccaggagtttgaagttacaatgagctgattgtgccactacactcctacctgggtgacagagtgagaccctgaaaaaataaaaaaaagaagaaagaaagaataaagaaaagaaaggagggaggaagggagggaaagagaggaagggaagaaggagaaataccctccccacagacttgtcattggggcacatttctgcaggatgtcccaagtggccccagggtgactttccagcactggacccataaggaaccacagggaccaccactatgaccagcctggcagggggtgatgatgagaggaagtgacaccccaacaacagaacctggaaagaagtgtttccagtgccagttggcccgtctgtttttaaataaacagaagcatgtttcatgttttgtcctcatagcgtccctggcagtgtcatgggacactcaggtggtaccactagttctgacaacctcttctcgcttgggaagccgaggtgggggctgatgggcgtaggtagactacctgtcccttatagtgacaaagaggagaatgccactgagggtgggggtcatgggaactggggcttcctccccgaacccatccaagcctccctgtcccaggaaacgacctcaccacctccaggtctcaggcagaacctggacaggctcctgaggcgcccgccacctccctccactgcagcctaccgtccaggccctacgctgtcacccgagtggtcccgtggtgtcctctggcttccttgcctcactgtcctcttcgctcctttagccgagtgacctctgtccctggagacccattccttctctcactagccccatgggctttgcattttgtggctggaatgtggctctgccatgccttggacactgcccctcagggaggccgacctgatcacctggtcactggtcgcaagtctgggtacacgttgtcatgggagtgattggcctcctgggaccactcccactagggctggcagctctagtgtctggttatttgacgtcagcctgacgtccacctcccgtcactcccctggccactggcccagttggtcctcttcccttgtgacagcctgtgtccacttccttttgccgccataaccaccacaaatgtggaggcgtaaagcaacacatttgtcatctttaggttctggtcatcaggagtctaaaatgggagtgcagggctgggtttcttctggaggctcaggaagagaatctgtgtctttgcctttcccagcttctatcccccagggcctctccctccacctctaaagccagcagcggagggcactcacatctccagttctcctgcgtctatctttgttcgttctggtccttttccttttcctttcctttcctgacagagtcttgctccatcacccaggctggagtgcagtggcacaacctccacctcctgggttcaggcaattcttgtgcctcagccacccaagtagctggggctacaggaatgtgccaccacacccgactaatttttgtattttttgaaagagacagggttttgccatgtcgaccaggctggtctcgatgcctgacctcaattgatccacctgccttggcctcccaaagggctggaattacaagcatgagccactgatcttggccttttttttttgtttttgagacaaggtcttgctgtgtcacccaggctggggttcagtggtgtgatcacacctcgttgcagcctccaactcctgggctcaagccatcctcccatcttggcctcctacaggtatgtgccaccaagcccaactaattttttttttgttgttgttgttgagatggagtctccctctgtcacccaggctagagtgtagtggggcgatctcagctcactgcaacctctgcctcctgggttcaagtgattctcctgcctcagcctccctgagtagctgggactacaggtgcgtgccaccacacccagctaattttttttgtatttttaggagaggtgaggtttcaccatgttggccaggatggtcatgaactcttgacctcaggtgatccacctgcctcagcctcccaaagtgctggtattacaggtgtgagccacccagctaatttttaaaatttttgtacaaaatgagatttcactatgttacccaggctgctctcacctggccctcaagtgatcttcccacctcccaaagtgctgagattacaaggcgtgagccactgcacctggcctctcctgcatccccacatcgggaccctggtgattacattggggccatccagataatccaggacagtctcccccatctcaagacccttaacttcatcacatctaaaaattcccttttgtcatgtaagatcacatattcatggtgtctagggtttaggatgcagacatctttgagtgccattattgagtctaacgcagcccattatggtggtccttaaggttcccctttccagggaagtcaccccaaatgtcaggacaagagggtttcaggatctccagcctcggctctctggcctcctgcccctgccctgcccagcagcgtcattcagcctcttctggggctcctcttacctcaagggcgaaggcctgaattggcaaaccctcagcactcactgcacaggcaccaggccaggccagcacagtgaacgagtgtcgtggagggaagtcacaggagcagtgaggatgcagagcagaggtacagcctgggcaaggggcagagagccccagaaaaagtgaaagggtacctcactcctgcataccccactgccccagcatgcacctcctggcccctgcacacaccatctgacacccaactgcctctaaatgcatctccagggccctgcacacacctgcccacaccccaccaccccagcatgcccctgcaggcacctcctgggccctgcacacacctgcccgcaccccaccaccccagcgtgcccctgcaggcaccttcagggcgctgcacacacctgcccacaccccaccaccccagcatgcccctgcaggcacctccagggccctgcacacacctgactgcaccccaccaccccagtgtgcccctgcaggcacctccagggccctgcacacacctgcccataccccaccaccgcaacatgcctggaccctgtacatacctgcctgcatcccaccaccacagtgtgccccggcaggcacctttggggtgttgcacacaccatctcccacccagcgtccaccacaggccccacctcccctctacatctgcatagtcaggtttggggcccacagatgctctgacataggtatatccagttcagcttctccagccacctgagtctttggggcaacctcttcatcgtagtgaaatctccacccaccttccctccccaaacccgcttctttgtctatggcggtggatgtatagcatcacatccccagagggtaatggagcatttgggtttaatggacagtgcaaagtgaatatccacaaggccacacagataggaatcaatgactgaaaaaataaatgggggaggagagacagccgtccctgtggaataattccaagtcctatccatcgatgctcccctttccgggaggtggagcttaacccatccccatcccatcagactgggctgcttccaaagagtagagtagggaatggggaatacccacttgacagaggcccctggctgaacccaccttacccaagaggtccaggtgcaggtcacctgggggaagttgccctcctatgcccctggaactggctgttcctttaggttaagcaaagtcttgagtaagggcacatgggcagggcaaggtggttcacacccataatcccagctactggggaggtgaggtaaggcaggaggatcacttgagcccaggagttccagatcagcctgggcaacatagcgagaccccatctcaaaaaaaaaaaaaaaaaggtgggggtacatggtcctctagagtgcttgatgaaatgatgttgagactcacctcagtggctgtgggctgcctaggggccaggctccatggagaaggacccggttgtggctttcggatcctgcactggggcctgagttccctctgtccttggacttggccaaacttccctgagtttcatctgcagagtagggaaacagcacctcaccatgaggggtaaagaggaactacggtgcccccagtcattagcggcagtgattgtcaccattgtcttcagcccagctaggccccaccagccagtggctgtggcctcaggcaagcactcagactgcctcagcttccccagctgtgaagctgaactgagactcctcagttaaggctgggaggattccagagcacaggggcaaagggatctctgaacaatagccacattttttcttttttttttttttggagaaggagtctcgttctgtcacccacgctggagtgcagtgccgcgatctcagcccactgcaacctctgcttccgaggttcaagctcttctcctgcctcagcctcccgagtagctgggattacaggtgctcaccacatgcccagctaatttttgtatttttagtagaaatgggctttcgccattttgctcaggctggtcttgaacttcaggtgaggccggccttggcctcccaaagtgttaggattacaggtgtgagccaccacacccggccaatagccactattgtgttgtatgggtgcctgtgtcttcaccccattctcacccccacatgcagaggcagaaacaggccctggaggaaggaaggcctttgcctgagcatggccccagacaccctgaggggaggggagaggggagagaggagaggaggcaagaggagaggaggggagaggggaggggagggggccagccagggtcagggtgcactctgctgagaagggcaatgggttccctgaaaaccagggctgccagcgcccttccctgcccctcaacactgagcccctgggtgtagccacgctggcttagagtcaccctccacagtacgccttgggaccatgtgccgtggaggacctggaccaagaggagtcagatcacccggccagtccttctatagccacagacacccaacgtgtgtttcctggacttggcatgccccagaagctgctggttttctccaggctttctttgttttagcactttatgagagagagtctcgctctgtcacacaggctggagtgcagtggcatgatcactgcaacctctgcctcccaggttcaagcgtttctcctgcctcagcctcctgagtagctaggactacaggtgagcaccaccatacctggctaacttttgtatttttagtagagacagggtttcaccatgttgcccaggctggtctcgaactcctgacctcaggtgatccacctgcctcggcatcccaaagtgctgggattacaggcatgagccactgcacccagtccagagaaattattaagtttcctgtggggagatgctcagaggccacgcaaacaccctatttctcatcctgttttcacccactcattgtagcatctgcccatggttttgttttatttaaggctagtccattttttttgaaataacattttaaaattgtttatatttaacgtatacaacatgttgtgtggttttggggggttttgctttttttgttttgtttcgttttgagacatagtcttgctctctcacccaggctggagtgcagtggtgcgatctcagctcactgtaacctcaacttcttggtttcagatgatcctcctgcctcagcctcctgagtagctgggactacaggtacatgccaccacacctggctaatttttgtattttttgtagagatggggcttttccatgttgcccaggttggacaatgtgatgttctgatatatttactttgatatacatatatagtgaagtgattactgcagtcaaacaaactacaaactaatataaaaatcatcccatatagttaccatgtgtgtgggggggtgcgctgggtggggagggtgaggttaccagtaattgatacaatgttattaactatagtcctcatgctgtccattagatctctagcatacttgccttccgtaactgtaactctgttccatttgacctacaatcttcccatttccccctgctcctggtaactgccattttactctatttctatgtatttgattttttttttctaattccacatataaatgagatcatgcagcatctgtctttctgtgcctggtttattcggttattcatgtatcttctaagttcatctgaattgtcacagatgtcaggatctctttttggtgtgtgtttgtgacagagtctcgctctgtcgcccaggctggagtgcagtggcacgatctcagctcacagcaacctccacctcccaggttcaagcgattctcctgcctcggcctcccgagtagctgggattatagatgcacaccaccacacccagctgatttttgtatttttagtagagacggggtttcaccatgttggccaggctggtcttgaactcctgacctcaaatgatccacccacttcggcctcccaaagtgctgggattacaggtgtgagccaccgtgcccagctgtccccatggttcttgatggcaacaattaatactagcctttgcctaatggtgttttctatttccatcattccatctgcatttattaattgaaattcaactgtaaggaagtgctgtctcttctcccccatttattgagctacttggaaaaacaaagaccatccaaatgagagcagcacaggctgcttattcagagtttgcaagggagtcagccgaagctccagggcaggcaggggagagggagagctgtggagtggaaaagggcaggctcaagtgagcccacaggaggctgttggcctggggaagctgggggcagccagctaacagcaggtgtcctgtggggttgcttagggaagcacaattggctttctctggttggtcctaagttggaaggggggccagtgttagagaagctgcaatcactgaccaggtcctgagcattgctgcagaggttggtggttggtttccggagctggttgctgcacaggttttgggccacagttttgttgccatgtatggattggccattgtcctgcacctcttctgcctcttaccaggagtttctaaggaacggttccagaccccaccccagccctgcatataaatctgatcttcaatttttttttttttttttttttgagacaaagtctcactctgtcacccaggctggagcgtagtggtgtgatcacggctcactgcaagctccgccttccgggttcacaccattctcctgcctcagcctcctgagtagctgggactacaggtgcccgccaccacgcctggctaatttttttgtatttttagtagagacggggtttcaacgtgttagccaggatggactcgatctcctgacctcgtgatctgcctgcgtcggcctcccaaagtgctgggattacaggtgtgagccaccgcgcctggcccgagacggagtttcactctggtcacccaggctgaagtgcaatggcgcaatctcagctcaccgcaacctccgcctcctgggttcaagcaattctcctgcctcagcctcctcagtagctgggattataggcatgtgctaccacacccgactaattttttttttttttgtattttttagtagagacagggtttcaccatgttagccaagatggtcttgatctcctgaccttgtgatccccccgctttggcctctcaaagtgcttggattacaggcatgagccactgcgcccggccttttttttttcgttttcttttgttttttgagacagcgtctctttctgacacccaggatggagtgcagcggcacgatcttggctcactgtaacctctgcctcctgggttcaagcgattcttctgcctcggcctctcaagtagctgggactacaggcatgcaccaccacacctggctaatttttgtatttttagtagaaacagtggtttgccatgttgcccaagctgctcttgaactcctggcctcaagcgatctgccctccttggcccaaagtgctgggattacaggcgtgagccactgcgcctggccagtgatcctcaactttgattcaaatgggcacctgttctttctgtacttcctgaaacaaagcgtggtggcaccctttagagagagctcaacttacactctgaatttgacaaatgtgcagttgaactttaaaacagattccagggctgggcgcggggcctcacgcctataatcccagtactttgggaggctgaggcgggcagatcatgaggtcaggagttcaagaccaacctgaccaacatggtgaaaccccatctctagtaaaagtacaaaaaagttagccaggcatggtggtgcgtgcctgtaatcccagctactcaggaggctgaggcaggagaattgcttgaacccgggaggtggaggttgcagtgagctgagatcgcagcagtgcactccagcctgggtgacagagcaagactccatctcaaaaaaaataataataataataataataaattatatatataaaaatcagattccaggcagccaggtgtggtagctcacacctgtaatcccagcactttgggaggccaaggagggtggatcacctgaggtcaggagattgagaccagcctgcccaacatggtgaaaccccgtctctacagaaaaatgcaaaaattagctgcgcatggcagcacacgcctgtaatcccagctacttatgaggccaaggcaggagaatcacttgaacctgggaggcagaggttacagtgagccgagatcacaccattgcactccagcctgggtgacagagcgagactccgtctcaaaaaacaaaaacaaaaaacacctctaaactctaacaaatgagctgagaagagtaaggcatttcagcaggaatgtctgttccactgggggtccctggagggagagcaggagtctgccttctgagctttccttgggccctttccaaagattgttttcttaggcaaaaattttgacaagtggccaatctagtgtcctgtcccaccttggcctgcagatcctattttatagaaatcatctttgaacttgtgagtgagttacattttgagaaggccaagtttgggttttgaagcaaaaccagcgtgtctgtcccccaaccccccaaatgatgtctaggagctcccgtgtcagtttcaccccttcttgaaagtcacagccaggtgtctgcttgctcattaaggggcagaggtgccaccccaagtggccgccccatgcagaagaggaaaatatctttttctcactcatcttaggttcatggctgaggcccctgtaacaaaagacagattaacaagataaaagcagacaaatttatttaaaacaagttttacgtgtcttgggagccctttataaggaaacaaagacctccccccaaaacaggtaaacctgcatatgtttatgttaggtttgatgaagattagagtcatgggcaaatctgattagaggacaaaaggatctgatctggctgggcaccgtggcacacacctgtaatcccagcattttgggaggctgaggcgggaggatcacttgagttcaagaccagcctgggtgagaccccgtctcaaaacaacaacaacaacaacaacaacaacaaaaagcttctgatttaatgataataaccttgggggaacttagcaaggcctgtttgttcaggttcttcttggcatctttgcatcttctgttcccctcctccaggtacaggggaggcacctcccacctgagggtctcatgacctgcttctggggagaagggaaaagaaacagtgcttcctgcttctgtgttctcaaaggccaaggtcatattttaggctattatgtcccgaaccccatcccttgttctcactgtggtccccggggtccgggatgtcacatggcttttccctttgccttcctgagctgcagcaaacacggctcactcctgaacacagggagcatctttctgctgtgacaaaagacaaaagcgtgactcttgggcccgtttctgctgaaatcctcagggacctcctcccccagttctgcggtctgtcctacccagttctagaattcacttcatgggtgtcttttctaatttaaattcatgtaaaggtagtttgggctgggcgcggtggctcacgcctgtaatcccagcactttaggaggccaacgagggcagatcacctgaggtaaggagtttgagaccagcctggccaacatggtgaaaccctgtctctactaaaaatacaaaaacttagccgggcatggtggtgcgcgcctataatcccagctaatcgggaggttgaggcaggagaatcgcttgaacccgagaggtggaggttgcagtgagccaagattgcaccactgcactccagcctgggcaacaagcatgaaactctgtctcaaaagtaaaataaaataaataaaaataaataaagggtagtttgtatcactaattaaaaataaattcaatatttctgcaaaataggaggtgatggggaaaaaacaaattaagtacagtggaaacagaagaatgttatggccgggtgcggtggctcccacctggaatcccagcgctttgggaggctgaggcaggaggaccacttgagcccaggagttcaagaccagcctgggcaacataaggagaccctgtctctacagaaaattaaaaacttagccaggtctggtggcatgagcctataatcccagctattcaggaggctgaggtgggaggatcacttgagaccaggaggtcgaggctatagtgagctatgattatgccactgcacccaagcctgggcaacagagcaagaccctgactataaaacagcagcaacaacaaaaagaatgtcatgaaaacctgtgtctctgatggttgcaggcattggtgccctggggccctcttcctcttgagacagggagggtggcgggtgctggtggtgctgggactccctccttggcctcaccaagggatgaggcagctggaacagaagcaggccgctcttgtgctgtgggatcatgcactggctgtggtggcccaccgtgctccaggcctcatcctcaaccctccccactgtgtctgtgtctcctactctgtctcttacaaggacaccagtcattgcacttagggcccaccctaaccctcatctagagatcttgccttaatcacatctgcacagaccctttttcctaaaagcgtcacattcacaggttctgggggcagggtgtatctttcaggggccatcgttccaccccctccagttacgtcccccagccccagctgccctcagtgctctgtcacctgcagggcctagcacacttgtgtagttccagccaggttgtgcagtgactttgtctatgtctgtgggtgccactcgaggctgagccctggccctgggcaggtgatccagtgaaggatggtaccatgggcactgcaggcagccctgtctggtggctcttcttgttcacagaggctgggcaggtgcagccaagggagggtctgaggccacaatgcccttctggggagactgttcctcacaggactgtgacctcctgaggagctcagagcaagagcccacaggagggtgggagggacccccttcggccaggacccaggcctcgggcacctcacccactgttggggtatagcaaatggctgaatcctttctggggaaggtgactttgcagaacatgtccaggccacctgacccagcacctcgattctaggaatcaaggagtagagaggctgcgccgttctcacccaagcgcccaagtgcaaggacagcccccagggtctgtagcggcaggggtggtgctgggcagtagtcagacatggctgattgttgtggggggcggagtgaaacagacgcagtgcatcccatgggctgatgatgaaagatgccgacccccagcaaccggctgggaaaggtctttaggacctggtttctgtctgtttgcaagcagtttagtttatttttattttttgagacccagtcttgctctgtcacctgcgctggagtgtactgctgaaatcacggctcattgaagcctcaacctctttggctcaggtgaccttctcacctcagcctctcgagtacctgggaccacaggtgcatgccatcatatccaactaatttttttctctagagacggggtctcactatgttgcccaggcttgtctcaaactcctgggctcaagcgatcctcctacctcagcctctcaaagtgctgggattccaggtgcgtgccaccacgcccagctgagagcagttttagatttacagaaaaattgcaaaggctgtaccaagttccccgacaccgcacacatctagcgtcccttacgcataacctctcacagtgctgtgctgcatttgcctcactaatgaacaagtgctgagatggtattaatattaatggagctccacactttattcacgttcttccatttttcctgaatgtcctttctctgtccaaggatcccacctgatctttagtcctcacatctccttagactcctctgggctgagacggtttctcaggctctttgtttttggtgaccgttacagttttggggagcagtggtcagggctgctggagaatgcccctccggtgggatgtgtctggtgttttttcctttctttcgagacagagtctcgctgtgtcacccaggctggaatgcagtggcgtgatctcggctcactgcaccctccacctcctgggttcaagtgattcttctgactcagcctcctgagtagctgagattacaggtgcctgccaccatgcctggccaatttttgtatttttagtagagacaggattttgccaggttggccaggctggtcttaaactcctgagctcgtgatctgcccgcctcagcctcccaaagtgctgggattacaggcgtgagccactgcgcccagcctgatgtttttctcacggtcagatggggtgatggatctgggggaggaagaccctagtcgtcacactccatcagaggcacatgcgtccacctgacttatcccagccagcgttgtcctggatcacctagcccagctgggatccatcaggtttctgtgctgcagtcactgacagccccctttccagactgcactctttggaaagaagccgctaagcgcagccacacctgagggcaggaggcatggcccctcttggaggtccgagctgctgtgctatttgggaatcctttgcctgggagatttgtctcttccctaccatgtacttacttactctgtcatttctttatattatatggactcatggttattttatagttcaggctttcatccatgatgctttatgtttttttccatttctactcaaactgttccagctttggccatcaagggttctttcggtgggtgcccatgaccccctcgccacacccatctgctttggtttctgtttctgaacatgccctccatgactggcacctccacgtacgtgctctaggctcttcctttctctctggccccatctttgaagcaggtgtttctcccagagccagtgcccatgggtccatgttcactaggagagtcagcagtggaggctggtgtagcagaatcccaagtgcactttgtacagcgtcactcaccggcactgatgcctgctctggggcctctgcaccctttgcttcactttgcagtaatgcgttttcatttactggatgattttaaagcgtgggaactaaccaggcacggtggccatgcctggaatcccagcattttgggaggctgaggccagaggatcgcttgagcccaggagttccagaccagcctgggcaacatagtgagtcactgtctctacaaaatataaaatgaaaaataaaaattagccaacccagtcggacgcggtggctcatgcttgtaatcccagcactttgggaggccacgttaggaggatcacacgaggccaggaattcaaaaccagcctggccaacatggcaaaaccctagctctactaaaaataaaaaaataaaaaatagctgggtttggtagtaaacgtctgtaatcccaggtacttgagaggctgaggcacaagaattacttgaacctggaaggcggaggctgcagtgaaccgagatcatgccactgcattccagcctgggctacagagggagattctgtcaaagcaaaaacaaaaacaaaaaaaaacacccttagctgaccaagtgggaggatcacttgggctcaggaatttgaggctgcagtgagctatgattgttctactgcacttgagcctgggtgggggaaaaaaaaaaggccaggtgcggtggctcatgcctgtaatcccagcactttgggaggctaaggcaggcagatcacctgaggtcaggagttcgagactagcctggccaacatggtgaaaccccatctctactaaaaataaaaaattagctgggtgtggtagcaggcgcctgtagtcccagctacttgggaggctgaagcacaagaattgcttaaacctaggaggtggaggttgcagtgagccaagatcgtgccactgcactccagcctgggtgacagagtgagactccgtctcaaaaaaataaataaataaaaaataaagtattttggtggacagagaccctcgggtccgagctgacacaagcccactggacgtttggcctgacagtggtattggcaccgagcacctcggtgcccactggatgtttggcctgacagtggtgttggcactgagcacctcggccacgctggccccacaacccgctggtagctgtgtgaccttggctggctgcttaacttctctgagcctgtttgctccctgggcaccagatttggaaaaagaacagactgtttgtgaggattacattccagtaccaacaagaaaggcttttgtaaatgattaagcagtacacacaggaccgtggctgcggaatgcagttgagggcatccctccccacgcagggagccagaaactgggataggaaaaggctggtggaacacccaccatctctcaggatctcgccgtatcttaccacctccccttacccccccaggaccgagtctcctgccattccgagcaggcctggtatgggtaatggtgtgaaggaaggcccggtgcgattgcatgaggatgctgaggctgtcctgtcctcgtccgtctcatcaaaggcaagtaccccggcctcctgggatgggtgttctcctggggccccagcctccccaccccccctcccaggctccctgcctcctcctcccagcctctgcaccccctccaaacaggctcagggattcctctgctgtgctccatgcagcccatcacaaatcaccctgtacctaggatgtgcatgttggtaccccttcctacctgggctgagggtggagtggtggagcctctctgctcccacggccccaaatactccatcatgggatggaggacgccagccaccctctattccaccaaaagccccacttgtgatgtgaatccaaccagcccagccacctggtaagaggccaaaacctaacccagttccagcgtggggtgggaagcctgaggtatcagacatgtcttggagcccccttttctccctcagattttggaacactaaggaattagccaaggccaggcatggtggctcatgcctataatcccagcactttgggatgctgaggtgggaggatcatatgagaccaggagtttgagaccagcctgggcaacatggtgaaaccccgtctctactaaaaatataaaaattagccaggcgtggtggtgcacacctgtaatcccagctacttgggaggctgaggcagttgaatcgcttgaacctggaaggcagaggttgcagtgagccaagattgtgccactgcaccccagcctgagcgacagggtgaaaccctgtctcaaaaacaaaaaaaaagagccaaatgcagagagccaaagggggtgggcatgcttggtctttactctgcatttccaagttcacctcttaagtccacaattccactgaagaaaagatattctctcaaagcaattgggtcagccctgttgttcaccatagaaaccagaacccccactggcccctaagtcctctcagctgaacctgaaacacagaccgacccagccccacgcagaaatcatcgcactcccagggcctgactcaggccgaccgcacaggcagttttcaaagtccatggggtcaaaggctgaggtggcgtcatcttccaggcctcccgacctttccccggattccaggtgacatctcagagcagcaggcgggcgggaggactcattcaccggggtcaccaccaggtgactgaggcacagggcaggcacgtgccttgaagtttagtgaaggtcccaacagagctggaagaacacctggatatggctgttgctctgcatgccggagaggagggggtctgcaacgtggatcccaccacgtggacaagcttgaggcagcggtggctgctgaaccacacgcagaaatgcgccagtgctggtcacttgccgggcatcacacacacatgcccattctcctctgtactggcaggccccaacaacattgctcttggtccgcctggccagccccaaggtgggagggactcactctgcaatgtctcttttctttggttaagaagctgagccttggctgggatggtggctcacacctgtaatccctgcactctgggaggcccaggtgggaggattgcttgaggtcaggagttcgagaccagcctggccaacatggtgaaaccccatctctactaaaaatacaaaaatcggccaggcgtggtggcacgcacctgtaatcccagctccgcatgaggttgaagtgggagaatcgcttgaactcaggaggtggaggtggcagtgagctgagatcacgccactgcactccagcctaggcgacagagtgagaccctgtctcagaaaaaaaaaaaaaatactgagcttcttcccactgtgtttatggccaacatgcatcccatctgggattgcccactttctcttgtcagctgcctggccgacaaatccttctttcgtaggatctccccacgtgatggatcttgaaacttcaacccctcagtgatgcctgctcccagctctttggataataaggtgtttgtgttcattagagaggagctggaagtatcagccagaggcagcagcctccactgagcatgtgaactggccccaacacacgtcctccaggtgccactggtggctacctggagaggtgcagtttatggacgtgtgttcctgatactaagatttggcattggccaggcatggtgactcacaccagagatcccagcactttagcaggccaagacgggaggattgcttgaacccaggagtttgagaacagcctgggtaacatagcaagaccttgtctttgcaaaaaaataaaattagctgggtgtggtggcacacatctgtggtctcagctactgaggaggctgaggtgggaggatcacctgagcccaagaggtcatggctgcagtgagctatgatcatgcacttgcactccagcctggtggcagagtgggatcctatctcagaaaaacaacacagagttggctttgtaacgttaagagccttggctgggcccgctggctctcgcctgtaatcccaacactttgggatgccgagacaggcggatcacctgagcctcaggggttcgagaccagcctgggcaacgtggagaaaccccatctctgctaaaaatacaaaaattagccaggcagggtggcgcgcagctgtaatcccaggtactgggaaggctgaggcaggacaaacaaccacttgaacccaggaggcagaggttgcagtgagccaaaattgcgccaccgcactccagcctggtggacagagcaagactgtctcaaaaaacaaacaaaacgacaaactgataggaggtaaccaccgaatggaggaggtggaagaactctgtctccagcagggtgcagggaggcactctccatggaatattccatttgcacacagaggcccattccagaggggagcagctggtccgactgattcagagaagaaactggcctgaagctggtaaggccttggactgctgctgggaccaccaacaagcgcccgcaattctcaaagctcatggaaccagacgtctgcaacctggctgcatgtcccagaaaaggcagaggtccccaaagacagcttccgagaagctaggagaagatcaaactccatggcgaagtttggcctcagaaacaaaatcgctgtgcaatctgtccctttgaggaagggagggctgggctggtggaggggaccctgggagcactgaggaaaaggaggctgtgttctgtggaaccagactgggggtgcaaggctgctgggtagcccaggacatgtgggagagggtctgagagctggcaccttgctgttgtaaagataggactgggagaccaaagagggcaccctctgcctgagctcagtcgggcagagctgggattcaggccaagtgtgtggacagactcaggcccagccctttaccccgagccacacactgagctgagcaaactccagaggtgggggcaaccatgctcagtctgactccggttgcctgttacacctgagtagtgcgccacatcccttccccatctccagcctccaccatatctatcctgggtttctgcaggagccgcttctaccctggtcacatttttatttttattttttattttttcagacactctgtcaccctgtctggagaatagtggtgcaatcacggctcactgcaaccttggtatcctgggttcaagcgattcttctgcctcagttttctgagtaactaggattacaggcacccaccaccatgcccggctaattttcgtatttttagtagagatggggtttcaccatgttgggcacgctggtctcgaactcctgacctcacgtgatctgcccgcctcggcctcccaaagtgctgagattataggcatgagacacagtgcccagccccactctggtcatattaaaaatagcccatttcggccgggcgcggtgtctcatgcttgtaatcccagcacttcagaaggccgaggcaggcagatcacttgaggccaggaattcgagaccagcctggccaacatggcgaaacctcatttctactaaaaatacaaaaattagccaggcgtggtggtgcttgcctgtaattccagctactcaggaggctgagggaggagaatcgcttgaacccgagaggcaaagtttgcagtgagctgagatcacaccactgtgttccagcctgggcgacagagcaagactgtgcctcagaaaaaaaataaaaataacccatttatttgggcaaagatcagcctccttgccaggctttgtaggatctagcacccacctctctttgccatctcctttctcttctctgggccccctccctttccctgtgccagcaaatctgccctccttgtggtcccccagggtcccctgctccttttcaccctagcctctgagtattcattcctccccacctaatactatgacacacaccccaaagtgacctgcacctcatccttcaagctcagcctctcacctaccaacccagagttcttacagaaccctgggccacctcctcgcggcaccttcccaatgggtggctgtatttgctttcatctgatgcttctgttggcatctggctctctgtgtggaccagtggcaccacggggacaggaagggtcttgtacacacccccaccctgcactgtggggctccaggcccttcaggatgcccttgcctggtgggacttcgcagattcctgggagtcactgaacaacctgcccttccacgttacattcagacagcaaagcattgcaggctgaggcagaagaatgctctcccctgcttctcaatgagtcccatggccgagtccactggggaaatggaatcagagcacctcccatccagaactttccagaatgctctctgccacttctcagtgagagtcccgtggccgagtcagcaggggaaatggaaactccaacctgatgggcaggtggtgcctgtgggatcccacagggctcggacacactgctgtgcggcgtgaccttccagggaaggagggagggctgtgggggagcaggggacttgggcagctccagaggactgcagaaagcgatggctctcaggctggcatgggagcagtcaacgcaggttggcagccatcatcagtgtcactgtcaccccctcaactgggctggatgaagagtcatagatgcctacctctggagtcctgatcggaagttgtgggaagggacacgctgacacagagtcagggtctgcttgcctgatacccactgccaaccccctgaccccaacggtccctggtgcctgttttcagtccctgtgtacctacaatgccacagtgccgtagtcaggtgcacacaggctgtggagggaactgaagtttgcacgtgggccagtcctattgtgagcctgtctctgagaatgtgaaacctgcacacctcacctccaaagtggatggtacctgtcatcttgggaggttttcactgtgtccccagtaggctctgtggcctgtggacccaccacagatcacccagaaccaagcaaggccaacatactcagggtggggtacatccctcggccccggcccagagggtgtaaggaaggcacttctggggcaaggtcctctgcggagccgcccccctgccctctgacctctgatcacatgttctgttgcagcgtgaccacaggcaagtgctcagctccctgctgtctggggccctggctggtgcccttgccaaaacagcggtagctcccctggaccgaaccaaaatcatcttccaaggtaagtgttggccatccccaggtgctagagaagctgccaggcggtcacctcctccttcatggcccccaaaccacgcttcaaattggcttttatttttagatttattttagaaataaggttttttgttgttttttttttttgagacggagtctcgctctgtcacccaggctggagtgcggtggtgcaatcttggctcaccgcaagctctgcctcccgggttcacgccattctcctgcctcagcctcccgagtagctggtactacaggcatgcgccaccatgcccggccaatttttttgtatttttagtagagacagggtttcactatgttagacaggatggtcttgatctcctgacctcgtaatccgcccgcctcggcctcccaaagtgctgggattacagacttgagccaccgcccccggccagaaatgaggtttttctctgttgcccaggctggcttcaaagtcctgggctcaagtgatcctcctgcctaagcctcccaagtagctgggactatgggtgtgctccactgcactcaattgggtttttttaatgcctctttaaaatccactcagaggccctggcgcagtggctcttgcctgtaatcccagcattttgggaggccaaggcaggcagatcacttgaggtcaggagtttgagagcagcctagccaacatggtgaaaccccgcctctactaaaaatacaaaaattagctggacatggtggcgggcacctgcaatcccagctactctggaggctgagtcaggagaatcgcttgaacctgggaggcggaggttgcagtcagccaaggtcgcgccatcgcactccagcctgggtgacagagagactctgtctcaaaaataaataaataaataaataaataaataaataaataataaaatccacttcgaatctgtacgagtttcctggggctgctgtcagaaagcaccacaaaccaggtggcctcaaacaacaggaatttcttctttcacagtcctagggccagaagtctgaagtgaaggtgtgggcagggctgcgttccctccagaggctctaggggaggatccttccttgcttcttccggcttctgggggctcctggttctccttggcttgtggccgcatggctccaatttctgcctctgtcatcacgtggccttctcccctgtgtgtctgttttctctctctctcttttatttatttatttttgtttgtttgtttgtttttgagatagagcctagctctgtcacccaggctggagttcagtggtgtgatcttggctcagtgcaacctccatctccccagttcaagcaattttcctgccttagcctcccgagtagctgggacaacaggcacgcaccaccacgcctggctaatttttttgtatttttagtagagacaggtttcgacacgttggccccgctggtcttgaattcctagcctcaagtgatccacccgccttggcctcccaaagtgctgggattatgggcatgagtcaccgcgcccggcctgttttctcttcttataaggacaccaattcgcatttagggcccaccctaacccagtatgaccttaccttaactctattacatctgcaaaggccctgctttcagataaggtcaccttcttggagactaggggttagaactcagacatagcttttcagaggacagaaattaaaccctcaacagaaaccctcgccctccctcgctagggttagtcacagggtcctctgaagaggtggcctttgcccccttcaaacagttaccagttcctgcctagggcccagaagcaagatggttacggcccgggccctctgcccctcagctgtttgggaagaatctgcaggcttgagccaggcccttcccaccaccttgagccgatcccctaccctctctgtgtcccagtttcctcctccgtaaagtggaggcatggatatccgcttcctccttggctggcatgggcatccagtgagctggcaggccttcgaaagggacagccttatttatttatttatttatttatttatttatttatttagagacagagtctctctctgtccccctggctggagtgcagtggtgcgatctcggctcaccacaacctccacctcctggatttaagcgatactcctgccttaccctcccgagtagctgggattgcaggagtctgccaccatgcctggctaatttttttgtacttttttttagtagagtcagcgtttcaccatgttggccaggctggtctcgaactcctgacctcaggtgatccacccgcctcagcctcccagagtgctgggattacaggtttgagccactgcacctggccagggcaggcccctttaagtgcgcatgagcaggtgcagggtgttgtgttctgcagggaactggggttcaacccttgaggcagcaggcatgcatgcatgttgcacacacaagtggtgggtggtgaggggtgagggaggcgggctgccagaccacgtcagaggctcctggtgaccgtttgtggcctgtttttctgggtctctcccaagagtgcttatggcccaccatggctcgggtcccccatgcccaagggcagcacagagccagaaagggaacctggcagccacagggggtgggagaggcaggatagcggtgcctgtgctgggaccctgggaggggcatgtccgggagagagggcagaccccacatgtagacccctgcaggccttgttctgagagagccagggcttctcagctgagacccaagtgcctggaggctgggacaccttccctgcaggggtttgggtgaatggtagtctagtccaggggcagggtgctgagtgtcaacccatctcagacacgttctcctctcaatggagaccctcactattctggggcttgggtgtcagctcagctcccattcctgggacaagattggggggaaaaggagggtgactctgctagtgggtgccaggggtggggccacgcagatgggaggttctgtcctttgcatctcagtggcttttgtgcttttgttttttccagtgtcttcaaaaagattttctgccaaggtgagccactatgtcaccgccccggcctggggacagtcaccactaccctgatgggctggcaggagttaggcaggtggtctgaggagagtctcaggggtggggacaggactacctgtcttcccattcccagctctgcctggacacagcccagcctgggaactgacgggacatcccgagtgtccttccggcagtggggtggggagactcaacagctctaaaacaaccttttcatgtttgatttattgttaaacagagagcaggtgctactttcttaataaaggaaaagataaactgtaaaagctgggatgccaaacaccaacagacatgcccttgggcagggctccgagctgctttgcagcctggttcgctttgcagtccccaagagaacttggtggggtgggaggcccagaaaacatagggaggaaggacggggctggggttgataatgtcagtctggacaaatcggggtggggccctcacatgggggtggggttatgtgctgtgcatggagatggggtcaccccggccccgcctccgcactttgggcgctctgctggtcacagaggcccgcagggagggcaggcagaggcagagggatgttgaccttcccgcttatctccaggaggccttccgggtcctctactacacctacctcaacgagggatttctcagcttgtggcgcgggaactcggccaccatggtgcgcgtggtgccctacgccgccatccagttcagcgcacacgaggagtacaagcgcatcctgggcagctactatggcttccgtggagagtgaggccccgccccgccctgccacagaatcgccccgcccacgcccgcccctctctctttcttctgcacgccccgctccctcctcttcgtgccttgcccctagccctgccttccctcttcccacaacgaaacactgggagactcctcacccaggccctcctgagggaccccctgactctgtcacatgccctattctgtcttcagagctcctctcctttgcccgtttgtctccagacgtttctccacccccacgcataaatcccagaggggcaggttactatgcccccagggccgtagggaaaatacgcatcattaatttatgccagcaggggggaagggaaggcagccatgtaaacctcaaaatgaggcccactccagagaccccatcagcttggccaggaggaagccaaacccgcctcgtgttcctcggtccccacccctgtccccgccccagcagagacgtgcgggtgctccaggctgggcctctgtgcatctgcaaccccctcactgccgtctcgccttctcctcctgccctgttcagagccctgcccccttggcctcgcctcttcgccggcgcactggctggaacgacagccgcttcactgacctaccccctggacctggtcagagcgcggatggccgtaaccccgaaggaaatgtgagtccttacatcggtgatgcgcatcagccccgggggctctgtgtctcgggggctcccaggtcggaatccctctctctatcgggccccaggggtttgcatctgggcctccgtgtccacagggcaggcctgatgtgtcattctgcagctgttccagaaaggcagcaatttgttctcttagcctgggggtcactttctgcttagatcaaaccaagggtcttcattttgaactgggcacagatgcagtaaaaatatgtaagaatacggccgggcacggtggctcacgcctgtaatcccaacactttgggaggccgaggtgggcggatcacttgaggtcaggagtttgagaccagcttgggcaacatggtgaaaccccgtatttactaaaaatacaaaaattagccgggcgtggtgacacgcacctgtactcccagctacctgggaggctgaggcaggagaattgcttgaacccgggaggcggaggttgcagcgagccgagatcgagccactgcactccagtgtgggcaatagagccagactctgtctctcaaaaaaaaaaaaaaaaaaaaaaaaaaagtctgagactagaatgcttaattcaaggaagataccatgatcatgaaaaatgtgtaagaatagaccgggcttgggcccaggtgcggtggcccatgcctgtaatcccagcactttgggaggccaaggcaggaggatcgcttgagcccaggagtttgagaccagcctgggcaacatagcaagaccccatctctacaaaaactgaaatattagcctgatgtgatggcatacgcctgtgatcccagctgctccagaagctgagggaggaggattgcttgagtctcgcagcttgaggctgcagtgagccatgatcacgtcactgcactccagccggtccacagagtgagaccctgtctccaaaaaaaaaaaaacaaaaaaagtgtaagaatagaggccgagcatggtggctcacgcctgtaattccagcactttgagaggctggggtgggtggatcacctgaggtcaggagttcaagaccagcctggtcaacatggcaaactctatttctactaaaaataaaaaattagccaggtctgctggcatgtatctgtaatcccagctacttgggaggctgaagcaggagaatcacttgtacccaggaggcagaggttgcagtgagccaagactgtgacactacactccagcctgggcaacagagggagactgtctcaaaacaaaaacaaagaaacaaaaaaaaagacaagggctgagcacttgcttcccgtggcgaaggtggagtctgggcttacgcatgcatttcccctctaataacaaagcttgagtgatggggttatatgtcttgaagaagaaggaaaacatcaacatccagacacacccaggcccagccggcttcgggaggagccgagagcctctgtggctcctccctgtgcctgggaggcctgagtcccacctgctgggctgctctgtcctggcaggtacagcaacatctttcatgtcttcatccgcatctcgagagaagaggggctgaagactctctaccatggatttatgcccaccgtgctgggggtcattccctacgctggcctgagcttcttcacctatgagacgctcaagagcttgcacagaggtaaggagagctgggagcatgaggaggggacgttcaggaagcattccctggggacagcagctccacctgggtcacatagacctggagaccaggcggagtggggtacgacccctgggtggggcaggctgtagacccacatccaaatcgggagaaaacacactgtgtgcagccgccactgaggaacctggactcactgccttaaatgcctaagtgagaggaactctggctggtgccacggctcgtgcctgtaatcccagtgctttgggaggccgaggtgggcggatcacttgaggtcaggagttgcagaccagcctgggcaacatggcgaaaccccgtctctaccaaagatacaaaaaaattaggcatggtggcacacacctgtggtcccagctactagagaggctgcggtgggaggatcacccaagcctgggaggtcaaggccgcagtgagctgtgatctcactgctgcacaccagcctgggtgtcaaagtgagaccctgtctcaagaaaaaaaaaaaaagtgactctgggaagcccagtgtgtcacctagagcattgatacctcacctcttcacgagcacacacgcaaagcatatgggtaaaacccagatggaaaggaagtactcttgcttgttttggtagttgggagaaaatcaaaaagtacaaagaatgatataatactcatacctgccactgcatgtgaacaggcattcacattttgctacatttgctcccagatattttgttttttttcttttttgtagagatggggtctccctctgttgcccaagttggtctcaaactcctgggctcaagcgatcctcctgccttggcctcccaaagtgctgggattaaaggtgtgagccgctgcactcagcccactcccagacattttttgtcaaagaaataaaatgttaggggtaacgctgagggcccaagtctctctcctgaggcctcttattagaagtgagggttgcacccctcaagactgctttgaaaatacttctgtatgtatttatctgtggcatgaacaaaaccatgtcacctttcacaggtataaaaaatgctccaagtggagtcagctcacccgggagtgcagctcccagctcagctggtttggggtgcatccaccagcatctgtgctctgttccgcctttttagtggctgcacagtgggccttaccttcttggggtgccctttggctgttgccaggttttctgtgatcagccgacatccaggagctcgtctccttgtgtgactgtaaaaccccattttcggtgtttctctctggagtgctttccagccccttgaccccacgttctcaccccacgtgatgccatcagaccccttgtttttgcccacctggtgagcagatcacagtgtctcctgtctggctgtttttttgagacggagtctcactctgccgcccaggctggagtgcagtggaacgatctcagctcactgcaacctccacttcctgggttcaagccattctcctgcctcagcctccctagtagctgggattacaggcgcccaccaccacacctggctaatttttgtgtgtttttggtagagacagggtttctccatgttggccaggctggtctccaattcctgggctcaagtgatccgcctgccttggcctcccaaagtgctgagattacaggcgtgagtcactgcacccagccttggctgttttaaattcctagttctaaatttactattacaaatgtttaaagtacccctactgacctgttgctgctccttcctcctccacacccacacaccccgtttagacccgcaagacagagcagggtgaagttcatggtcacttatgtccactctgtgcaacagctcgcaggggctccccagggagggcgcaggtcggggaccaggcacgggagcacctagaatgttcctttactagacgtggagtagagctgattagatgtgagcagtggctctaggagttggttctatgattctctgtgtttctgccttttaagaaattttatttctcggccgggctcggtggctcatgtctgtaatcccagcactttgggaggccgaggcaggcagatcgcctgaggtcaggagtttgagaccagcctgaccaacatggagaaaccctgtctctactaaaaatacaacattagccaggcgtggtggtgcatgcctgtattcccagctactttggaggctgagacagaattgcttgaacccgggaggcggagggtgcagtgagccgagattgggccattgccctccagcctgggcaacaagagtgaaattacatctccaaaaaaaaaattttttttatttctcgagtttgagtgaaaggagcgacccggaggtgaggcagtggggcgtgtgggtgcgcatgagtgcgaacacacgtgggggtgcaagtgcatgtgtgtatgtgcacgcaggttgctcctaggggtgcaaaggcgcgcgcacgggtgcggggtgcgcgccccctcgcggcgccttcacggccctcccgcccctcgccctgcagagtacagcggccgccggcagccctaccccttcgagcgcatgatcttcggcgcctgcgctggcctcatcgggcagtcggcctcgtacccgctggatgtggtgcggcggcgcatgcagacggccggcgtcacgggctacccgcgcgcctccatcgcccgcacgctgcgcaccatcgtgcgggaggagggcgccgtgcgcggcctctacaaaggcttgagcatgaactgggtcaagggtcccatcgccgtgggcatcagcttcaccaccttcgacctcatgcagatcctgctgcggcacctgcagagctaggggaccctgagctgctctcaggacggtggaccggtgacccctttgtattctgggcccatggaacggtgggggggtgcgcttgattctacttcaggaggcacatggggcgctttatggaacgagcaggtgggcctgaggggcctgggctcagagtccacgtccaaacgcaaagctggcagccctggaagtgcagtgttggggcgatggtgtggggggtcccgcagctcccctcttccttcctctgcagacgctggcgctgtctgccggaggtgttgcccaaaaggccctagtggggcgtggtcagctccacctcctgatcctgtgtgtcctccgacatgctgctgattctagtgacccctgtccccaccaggctcagagccagaccgcgcctggaccttcttgttctgactccacgtgcctgcccggcctccagggtgcgggggcgcctttcttgcaggcggaccctgcccaggatggggccagcctcgtgctcagctttggccacaaatgcagcccctggcccaccccaccctgccggccctgccttctccagtatttcccacatggccacgactcctcagtcactagagcctcctgctgggaacagtgtcccccagagcctcatgtctatcctagaccctgcaagcagctgggtccccaagagtgcatctccccctagagttgcctgcccatgcccacctgctttgtaaccttcccaggagattcatgcttgctctgcacagcagggctcgaggcccaggccatgacacggaactgcctcaggtttgggtcagacctgcatcctggggcatctgctgaaatgtgagcacacaaaccacctcctttggcccagaagccccccaggcctagcatctcagtgccccaaccctctgcccagctgtggtatccagcaggtccttgggtccccacttgagcaggcacttggctgggatatggagcaatttaaagcccacaggggttgttcagtttctatgaaatggagcatggggtgcctgctagcctcaatcccccgaagtgggagcctcatgatagagtatagcttgggggtgggaggtgaggaaaatctgaggtacccaggggaacccccagctaactggtctctcagaggagtcccccagggcccgccagctatcacagggactcagaaacacccatttcctaatgacatggtgagtttcttgatttcttttttttgtttgttttgttttggttttcaacttggctgaccccgggtctatgatctattcacatcgaacccctgactggtctgcctggtgccagggtgagcgtgaccgtgagtgttgctttcgacagctggctcagcacacgctgtgtgaagggatctgagcttgttcatctccagtcgtgacttcatttcccttccttctgtcctcctcctgttcttgccttggacctgcaggtgtgcagaccgctctctctgccttccttgcatgtggccaccagccatccctgatcttgtccccagaggcccaggcagcctgtgatggctgtgaggggctgtcccactgtgtgggtatcccttacccagcacttaaacttggcaggagaggcagggcaaccctcacagggagatgggagggcacccaactcccacaagcatgcaacagcagtaggaattgggggtctgccccaggtgggtgagaccaaatgagtggatttggggccacaggctaggcaggagagacaaggggtaggtgggagggtcccccagtccctgctgaccccagtgtgtctccccggagatggctcctagctgagtgggacccggcaggagttggggacagtgctgtcccccacccctgcacacagccaggccctcaggctctgcggtcactcgcctccctgctggtcactggtcttggtctggagttatattttgatgccatgaagacactgtttatatctaatgtttatatattttaaagatttgtgccaagagagtatatttaataaaaacttaaatgacttcttctcctgctcctggctcttctttggctctgaccgcccccccatcttcccccatgaacccccaaacagggttgaagtgcttttgacacatttgtgataaaagttctgaataaaagtcttgaataaagaagtttttaaatgcaattgttgtttgaattaatacataccacaattttccagaaaacaccagctgtccacaagggtttacagtgaaaagtaggtgaacagttccctctgcagggggcctcctgtgaccattttctcttgtctcctcccacagagattctgtgcatacactcatccctttcaggatatatgtggccacccacaaaggcaggaggggccgtctctgtgcagccagcacagcccaaagtctcatgggcttgaacatggccttccttcccaagagccctgcactctggggctggctgaggcttcaggcctgaacgtcagtcaccatctgcaggggcagccaccagagggtctccagtggcaatcctggctcacttcacctgcagcccattggccagagcaacttggaggacccacccactgccaggccagaagtgggagcctctgcgtgcccagagaggaggggcggctgggccagcacaggcctggtgctcttgttggggtgggagtaggaataagttccactgcgctgaccccccactgctctccaatctgctcacgtgcaacaggatttcttttgagttggtctccgttgtgcacattgttcagcagctgtgcggttttctcctagaggatccccaggatgacatttaccagggtgggtgtggtggctcatgcctgtaatcccagcactttggagactgaggcaggtggcttgcttgagcccaggagtttgagaccagcctaggcaacacagtaagaccccccatctctacaaaaaaatagaaaaattaggccggatgcagtggctcacgcctttaatcccatcactttgggaggccagggcaggtggatcacttgaggtcaggagttcaagaccagcctggccaacatgctgaaacccccatctctattaaaagtacaaaaatcctagctactcaggaggctgaggcaggagaattgcttgaacctgggaggcggaggttgcagtgagccgctgcactccagcctgagtgactgagaagtctccgtctcaaaaaaaaatttttttttaattagccagtcttggaggtgcgtgcctgtagtcccagccactcagaaattcacgcctcccttatgttaccaaaccaggctcgttctgcccagcagtatgccaacagagatgacaggttttgcagcaaagagtttattcacgaggcagccgagtgaggagacaggagaacagatctcaaatccgcctccctgaagatgggattttaggaatatttaagggatagaggagcaaggtggtcagagacgtggggaaaagtggggcagtcggggaaccgtgcgtgcgtagtcaagcttcatggcttttccataggatgtgtgttcacaaaatgacattgttatcatgatctgagggtggagtgtttggccctctaacgtcaaaggtcaccacctaaatatacacaggccaaggtgaaggttcggctctcagcccatttggattggacaagaactgatcctgttcctgaagaacaacttgagcaaccattaccatggtggcccatacatagagatattatctataaggaaactagtgggagtttttttgtttgggtttttttgttttgttttgtttctttgtttttgagacggagtgttgctctttttgcccaggctggagtgcaatggcatgatctcggcttactgcaacctccacctcccgggttcaagcgattctcctgcctcagcctcctaagtagctgggactacaagcgcccgccaccacacccggctaattttttgtatttttagcagagacggggtttaaccatgttggccaggctggtctcaaactcctgacctcaggtgattcactcgccttagcctcccaaagtgctgggattacaggcttgagccaccgtgcccagcctatttttctgtctttcttttcttttttttttttttttttttgagacagggtctcactctattgcccaggctggagtgcagtgacactaccatggctcactgcagcctccaactcctgggctcaagccatcctcccacctcagcccccctaggagctgggactacaggtacatgccaccacgcctggctactttttgtattttttgtagagatggggtctcaccatatttctcaggctggtctctaactcctggctcaagtgatctgcctgtcttggcctcccaaagtgctgggatgacaggcgtgagccaccacacctggcctgggagtttagctatacattgtttagctgagtgacttttaacactatggggtttataatcaactaaaaacaagtgaggtaagttaagattggtaggtctaatcaggtgagccctcagttccccttatggatgggcaattgttaggtattgccatgacaatgtgatagcaatttggtgggggctgctgaactcatctgcaccccgcctctgacatccagcccagatttctgatctaagttccacgtttcacaccagcccctgaaccttggtcaacccctcccctctcccacccaccactgtggcatctcctaacagtatagaggtgagcccgtggacctgtctagactagtgacagtgaagaagatgtttgctagctgcgtccaagaagagcttcaggagtccttttttttttgagacggagtcttgctctgttgcccaggctggagtgcagtggcgcgatctcggctcactgcaagctccacctccaggttcaagtgattctcctgcctcagcctcacaagtagctgggattacagatgcccgccaccacgcccagctaatttttatatttttagtagagacggggtttcaccatgttggccaggctggtcttgaactcccgacctcagatgatctgaacgcttcggcctcccaaagtgctgggattacagatgtgagccaccacacctggccaccaaatgctttttgctataaacaattccgcgcagcctaggagtgtcctgaagaaacacaacatggtaccccaggtgcaaccggcggctgatgactgaaggtaggtgtgtaagtagcttaacccatgcccggacgtgggatcatcctgagataattgctctaccctgccccgctaaggcccacagcaggactgagcctggttgcccacagtgtcacctgctcattggtgccccctgcagggcatcttccctcctcgtctcagctctcacccgccatgggggctgcctggggacacctcccaggtaaaccactagctctgagtccttttggggtcatctttgggggaaacctatccaaaaaggaataggaatgccaggtattcctgcaaatagatcatatagatttataccacatactcacccatatttgatcttccataatctgacaagtaaaaaatggtatctcagccgggtgcggtggctcatgcctttaatctcagcactttgggaggccgaggcagctggatcacttgagctcacgagttcaagaccagcctgtgcagcatggtgaaaccttgtctctacaaaaaataccgggcatggtggcacgtgcctgtaatccccactactcaggaggctgaggtgggaggatggcttgagtctgggaggtggaggttgcagtgagtcgagatggcaccactgcatcccagcatgggtgatagaaccagaccctgtcgcaaaacaacaacaacaacaacaaaaaccagttaatttatggccaggcatggtggctcacacctgtaatcccagttctttggaaagctgaggcaggaggatcacttgagacctggagtttgtctctataaataatttttttttttggtgggacagggttctcattctgtcacccaggctagggtacagtggcacaatcacatctcaccgcagcctcaacctcccagggtcaagtgattctcccacctcagcctcccgagtagctgcgactacaggcgtgggccactatgcctggctaattttttatattttgtagagacggggtcttgctatgtcacccgagctgatgaactcctgggctcaagagatctgcccacctccacttctcaaactgctgggattacaggcgtgagccactgcacccagccctctacaaataattttaaaaactattttactattttaaaagttgaaggttatattttgttttatctatgagttttatttcccctttttattttgtttcggcttgtctggaaatggtatattccgtttcttcacccatagggcttcacaacatcagcactgctgacatttggcgctgataatcctctggggtgaggccatcctgggcaccacacggtgttgagcagcatctctggcctccattcttcagacaccaagagcaacacctccaccccttgtggtgacaactaaaagatgtctccagacatcaacatgtgttcctttggagcagaaccaccccgtcctgtgagaggcacggatatggtggttacaatggatacatcaacaagaatttaaatgtttggccgggcgcggtgggcgcggtggctcaggcctgtaatcccagcacgttgggaggccgaggcaggtgaatcacttgaagccaggagttccagaccagcctggccaacatggtgaaacccatctctattaaaaatacacacacactgccgggtgcggtggctcacgcctgtaatcccagcacgttgggaggccaaggagggcggatcacgaggtcaggagatcgagaccatcctggctaacacggtgaaaccccgtctctactaaaaatacaaaaaattagccgggcgtagtggcgggcgcctgtagtcccagctactcgggaggctgaggcaggagaatggcgtgcacccgggaggcggagcttacagtgagccgagatcgcgccactgcacttcagcctgggcgacagagcgagactccatctcaaaaaaaaaaaaaaaaaaaaaactacacacacacacaaaaattaaaatatttatcttccctctgagccacacacaaagacctcaaccacccccttctatctttcctatttttatttatttatttattttgagacagagtctcgctctgtcacccacgctggagtgcaatggcgcgatcttggctcactgcaacctctgcctctggggttcaagcgattctcctgcctcagcctcctgagtggctgggattacaggcacctgccaccgcacctggctgatttttgtatttttagtagggatggggtttcaccatgttggccagggtggtctcaaactcttgacctcgtgatccaccgcctcggcctcccaaagtgctgggattacagatgtgagccaccatacccagcctgatgaaaattttaaaaaagaaaattcttaaaccgttctaagtcagggaactgtctgtatacatcttacttatacaaaaaggttacatatgcaccttacattgtttttgtttttgttttgagatggagtctcactctgtcacccagactggagtgcaatggcatgatcttggctcactgcaacctctgcctcccgggttcaagcgattctcctgtctcagcctcccgagaggctgggattacaagtgtgcaccaccacgcttggctaattttttttgtattttagtagagacagggtttcaccatgttggccaggctggtcttgaactgctgacctcaggtgattggcctgcctcggtctcccaaagtgttgggttacaggcatgagccacggcacccagcctgcaccttacattgtaacacacgtgtggacacaccctggagtcacagctacaggacaatttcagagtccatgacggccccacatcccttccctgggtcaccaaggcctcaatatgcccctcccccctccctgtgtgtgatatctatacaagtcacctgcatacctgtagcagacgctggcatcactgtgggctccccgccctcccattcctcaaactggttttcctctaaggtttccctgcccatctaaccttctcctggcactccctcatggtgcatttctctcacctgcccgtccgtcccaggccacctgccctctcagctgggactccaacttcccctgatttctggtctcttccatcctgcttttggacttttcctgggacacttgcatttcttctttttctttttttttttttttgagacagagtttcactctgtcacccaggctggagtgtgatgcgatctcggctcactgcagcctccacctctcaggttcaagcgactcttctggctcatccttctcagtagctggaactacatgcatgcgccaccatgcctaatttttgttattttagtaaagactgggtttcaccatgcgttgaccaggctggtctcaaactgctggcctcaagtgatctgcccgccttggcttcccaaagtgctgggatttgggattacgggcgtgagccgccgagcctggcctccttcttgctctcctttctcctcccagacctttgctcccctctcagtcctgctcctctctccctcccgcgcagcccccaccctgcacccgggcaggtgccacagggacgtgcaagacagctaccaccctgcacaagcccgagtcccaaaccactcagaccctgtttgtaaaaatcggcatgctcctttatttgttcagaagagcagccagcatcacccttgccactcaaacctggcacatacgcttcggagacaatggcctcgggaccctcatgctgctgggcccaggagagacagttctgaggcagaaactcggcgtccaaggggggccgcgggtcaggcactgtggtgaagggaacgccggggagtccggccccaccttgcagctggggacacgggggcgcaaacagagggggcaggctagtgtcccgctgccccaggaacagacctcagggccccaggagggtctgcaggcagctaggagcctgccaagtgctggtggaagtagaggccgaaaaggctggcgagcagctggcaggcagccgtccaccagatgaggtaggccaggacgccacggaggaagaggggagtaagcaggccacccagagccccggcaatccgcgctgcagtctgctggacttcgtcctccccagagccgatgggggcagcgctggctgaggatgggtcgggggatagtagaggagctgggcccaggccccaggaatagcctcctaggagaagaggatgaagcgaggtatgagtggaaaaatgggggagggggcgagggacagggctggcacggggggccaggcccattcctccagacactcccacccctgtctcagactccatctccagcccagtctccaccccctcaggcgctgccccctgtccaaggcaaaccctaccccaggccccacctcctgctcagatcctgcctcaatacatgccctgccccctccccaggccccgcctcctgccaagacgcaacccctccccaggctccacctcctaaggcaaacgccatcccaaactccacctcctgctcagaccctgcctcaccacagtccccgccccctacccaggccccgcctcctgctcagattgcacccatccccaggctccacttcctgtccaaggcaagccccactccaggctccgcttcctgctcagaccctgccttaccacagtctccgccccctgcctaggccccgcctctccccccccaccgcggtccccgccagagtccacctccactctgttttatcttccaactccgcccctcctccacccccacaccgcggcatctcacccagcgtcttgagcagaagtgtgcagttgagggtgaggatgagcggcgtcaggtactgcaagctcaccacggtcacatagcagtagactcggaccacctgtgggcaggtagcaggggtggctgcagcaggaggccttctggtttgggacgactccacgcccaaaggaccaggaaccccaccctgagccccaggttccctctggcctaggtcatcggggcgtccataccctctgctggatttcacgggcttcgatgcggccagcctcccttcgcagctgctccacccgggccttggccaggcacaggtaggcctgcaggtggggccgggtcaccgccagccgcagcaggcacagcaccaccagcaaccagaggcgcccagagtcgaaggcagaatcggacagcctgtgcggagagggccgggggcaagggactaagaaggtcgcccccgaccccccaggatcttccccaggctcctccctgaatctcagaggctagggcacccaggggagccccagctacctcctagccccacccaatacgcacagggagaaacgcgtctccccaaacggcggctggtgcaggaagtcccgtgcaatgggctttgtccagagccacaggatgaacaggggagacaggaagctggtgtgcaggaggaacctggggggtgagggcaggagggagtgaggcctgggtaccccctctcctcgagtctctcccttaagctccctagtccccccacccaccaagcgacccacttaactgcagcatgggtctgtcctccgacatggtcagtgcgtcccggtgggtctgggccagccgcaggcctgggaaggtgaggaaggcacccagcacagagcccaccactgccagtcccacgcggatagccagcttggccacaggaagcctaggagaacaccaggtcacgagcctgcctgggggaccctgggagggtcccagcctgcccttgcctccctcccccattcccaggactcacgcccagtcccagccctgcttcttcagaagtggctctaagttctgggtcatgctggccagacctggggacgataagaagaggaccgagtagagtgaattcctagggtctctaaggccactctgttccctaaccccccatccctcaggcatccgtttgcttcccaagtaggaatgaacaagggtctgccaggccctgagccaggcacaaggacaattttgtgctctagttacacagtactttttacaagaaacaagattggagtggtggttcacgcctgtaatcccagcactttgggaggctgaggcaggcggatcatctgagatcaggagtttcagaccagcctggccaatgcagtgaaacccccgtctctactaaaaatacaaaaattagccaggtgtggtggcaggtgcctgtaatcccagctacttgagaggctgaggcaggagaatcgcttgaacatggggagcggaggttgcagtgagctgagaccgcaccattgcactccagccttggggacaagagtgaaactcagtctcaaagaaaacgaaacagaatgcaccaggcagacactcctgattgggctgggaacattcaggggtatctgttgagcctgagctccctaggttatagaaggaatctagagggggatgaaggactcctgcaggagaaaaccaaagtcctcctggaggaaggaatcctcaattcaggacccaagatttttcaaaaattaagagcagggctgggtgcagtggcttgcacctgtaagtctcagcactttgggaggccaaggcgggtggatcgtttgagctcacaagtttgagaccagcctgggcaacatggcaaaacccccatctctacaaaaaatacaaaaccaggggtggtggtgcacgcctatagtcccagctactgtgaaggctgaggtgggaaggatgggttgagcccaggatgtggaagttgcagtgagctgagatcatgccactgcactccagcacagagcaagaccttgtcaaaaaaaaaaaaaaaaaggagcaaattcatatgagctcacaggcaaaatcaccaaatgcataaggaaacaaatcaccataaaggagagttaacagaaaaacaacagtcaagtttaggcctcaaagacttcagaaattggtgctgtcaattatgtgtcaaatgactaaggaaatgaaagctgtaatcacagaacaagtgacatgagaattccttcagatgactgggtagagttgcaaaggaaccaaattaaactcttccaaaggaaaactgtaagtattgaaataataggttgttaaacagcacattaggaacagccaaaggaggaagtgatgaactggaagacagatctgaagaaatcactcagattccaactcagaaaaacaagtaggtgagaaatatgaagagaggctaagagataaggaagacagaacagagagcccaacgcaaatcaaatcagagccccagagggagggaagagaaggaatgaagaataaaaggaattactggaagagaatggttgagaagtttgcagaatgaaagacagacacaaagtatatcaaaccatgtaaataaaaagaaatccatacctagacataatggagtgaaactgcagaacaccaaaaacaaaaaaattacaaagcagccagggagttaagacagatcacctacaaaggaacaacaattaggctgacagccaatgtcaactgcaacaacagaaaaggaacaaatagaaagcaaaaaagtaagatggtagaaacaaagtcaaatatgtcagtaatcacaataaatgtaagtagactaaactttaaagttaaatgacaaagactgtcagactacattgaaaatatccagctacatgttttttaaaggatgacataccttgacataaagtcactggaagactgaaagtaaagggatgttaaaaagatacagcaaatactaatcaaaagaaagcaagctagaaaggctatactactaccagccaaactagactaagaagtagtattagaataggccaggcgcggtggctcacacctgtaatctcagcactttgggaggccaagacgggcagatcacaaagtcaggagttcgagacgagcctggccaacatggtgaaaccctggctctactaaaaatccaaaaaatagctgggcatggtggcgggtaataccagctacttgggaggctgaggcaggagaatcgcttgaacccaggaggtggaggttgcagtgagccgagattgcgccactgcactccagcctggccaacgagagcaaaactctgtctcaaaaaaaaaaaaagtagtattagaagacagaagggttccatacatcatgataaaatggctgattcaccaggaaaatgtaacagttctaaatctgtgaatagaactaatctgtgaattgtgaataggctgcaaaatatataaagaaaacactgacagaattgatagggaaattgagagctctcttgtcccagagggagattaacttctgctgactgataagtcacagacaaaaggttaggcaagatggagatttgaatttattaaactcatagagccagggaatatgtccttcaattagaacatgtgaaaaaaggcaaaacaacaaaaacagaatatgtccttcaagaaaacaaggaatagtcacaaaatgtgatcacattccaggccatagggcaaatcttaccaaattttaaagaaattatttcaaatagaccatctgtgcaattgagctagaaataaatatgtattttttaaagatctatgtttgaaaaatttaaaaatatttaataatccataggtcaaagcatagcaagaccccatctctacagaaatcagaagggaaatgttaaaacaccccaaacagaataataaaaaatatcagtcaaaacttgggtaaactgccaggtgtgatggctcacacctgtaatcccagcactttgagaggccgaggtgggtggatcacctgaggttaggagtttgagaccagcctggccaacatggtaaaaccccgtctctactaaaaatacaaaaattagccaggcgtggtggcgtgcacctgtaatcccagctactcaggaggctgaggcagaagaattgcttgaacccaggaggcagaggttgtagtgagctgagattgcacagttgcactccagcctgggtgacaagagcaaaactccatctcaaaacaaaaacaaaaacaaaaaaaaacttaggtgaacaaaagtgagacctggtaaaatatatatagcattaaatgctatatatgctataaaattagaaaagattgaaaatttatgagccaagtagctaactgagaaattggaaacaagaaaaggaggtacgccagtactgttctcaaatccagaggtcctagccacaccaaaggggaaggatcagacagaacaaaagaaaaccaaaaagaatctgcaattcaataaaaatataattgtttagcaaggttagtccgtggagacactcaaatttgacccctatatgataacacaaaaattaatgtcactgtccatcagcaacagtgagtagtttaggagcttatatgaaatgtaaaagttgaaatattttatttattgatttttaagatggagtcttgctcttgtcgcccaggctagagtgcaatggcgtgatttcggctcactgcaacctctgcctccggggttcaagtgattctcctgcctcagcctcccgagtagctgggattacaggtgcatgccaccttgcccagctttttttttttttttttttttagacggagtctcgctctgttgcccaggctggagtgcagtggcgcgatcttggctcactgcaagctccacctcccgggttcacgccattctcctgcctcagcctccccagtagctgggactacaggcgcctgccaccacgcctggctaattttttgtatttttagtagagacggggtttcacggtgttagccaggatggtctcgatctgccgacctcgtgatgtgcccatctcggcctcccaaagtgctgggattacaggcatgagccaccacccctggccagtcattctatattttcttctaaaatatttcagccaggcgtggtggcaagcgcctgtaatcccagcactttgggaggctgaggcaggtggattgcctgaggtctggagttcaagaccagcctggtcaacgtggtgaaaccccatctctagtaaaaaatacaaaaagtaggccgggcacggtggctcgcgcctgtaatcccagcactttgggaggctgaggcgggtggattgcctgaggtctggagttcaagaccagcctggtcagcatagtgaaaccccatctctagtaaaaaatactagagatcgcccactgcactccagcctgggggaaagagcgagactctgtctcaaaaaaaaaaaaaaagacaatgtagaatgactttctgattttagggaaggatatttttcaagacaaatatcaactaaaataatcaacttccattcatcaagacactagaggtgacacttacaactacatttgacgactcagcaaagaaagtgtgatgcatgtatgcagacggaaaataatgcaaatagtggtcaaatgaaaacaaaagaagtattggcaatgaagtggataaatttggaacacttgtgcactgctgctgggaatataaaatataaaatgggctgagcacagtggtgcacacctgtaatcccagcactttggaaggccgaggctggcgattgcttgagttcaagagttcaagactagcctgggcaacatggcaaaatctgtctctattaaaaacacaaaaattatctgggtgtagccagatgtggtggctcacacctgtaatctcagcactttgggaggccaagatgggcaggatcacctgaggtcaggagttaaagaccagcctggccaacatggcaaaaccccatctctactaaaaatgcaaaaattagccaggtgtggtggcgcacacctgtaatcccagctacttgggaggctgaggcaagagaatcacttgagcctggaaggtggaggttgcagtgagccaagatcatgccactgtactctagcctgggtgacagagggagactgtctcaaaaaataaaaataaaaataaaaaaataaattagctgggtgtggtggtgggagcctgtagtcccagctacttgggagcctgaggcatgagaatcacttgaatccgggaggcaaaggttgcagtgagtggagatcacgccaccactgcactccagccagggcaacagaatgagactctgtctcaaaaataaaataaaatggttcagctgctgtataaaacagtatggcagtccctcaaaaaattaaaagtagaattatcatataatccagcagttccacttctggatatatactctccaaaactgaaaatggggtctcaaagagatacctgtacactcaggttcacagcggtattagtcaaaaagccaaaagttgggaacaacccaagcattcatctgtggatgaataaacaaaatgtgttccacccagacaatgaaatagtgttcagtctttttttttttttttttttttgagatggagtcttgctctttcacccaggccggagtgcagtggcactatctaagctcactgcaagcgccgcctcctgggttcacaccattctcctccctcagcctcccgagtagctgggactacaggtacccgccaccacacccggctaattttttgtattttttttagtagagacggagtttcaccatgttagccaggatggtctcgatctcctgacctcgtgatccgcccgccttggcctcccaaaatgctgggattacaggcgtgagccaccgtgcctggcagtgttcagtcttaaaaatggaattctggctgggcccagtggctcacgcctgtcatcccagcacgttgggaggcggaggtgagaggactgctcgaggccaggagtttgagaccagcctgagaagcatagcaagaccccatctctacagaaaaaaaaaaaaaaattaaaaattagccaggtgtggtggcatgtgcctgtggtcccagctacttggaaggctgaggtgggaggatcacttgagccctggagatcaaggctgcagtgagttgtgattgcaccactgcactccagcctcggtgacagagtgagatcctgtctcaaaaaaagaaaaaaaaattctaacacctgctacaacatggatatgccttgaggacattgtgctaactgaaatgagcacgtcacaaaaggacaaatactgtatgatgccacttatatgaggaacccagagtggtcacattcacagagacaggacgtaaaatggtgggtgtcaggggctgcaagaaggaggaacagggagttagtgtttgatgggctggagtttcagttttgcaagagcaaagagttgtggagatggacggtggtgatggttgcacgacatctaaatagactttttttttttttttttttttgagatggactcttgctctgtcgcccaggctggagtgcagtggcgcgatctcagctcactgcaagctccgcctaccaggttcacgccattctcctgcctcagcctcccaagtagctgggactataggcgtgtgccattagcctagctaattttttgtatttttagtagagacagggtttcaccatgttagccaggatggtcttgatctcctgaccttgtgatccgcctgccttggcctcccaaagtgctgggattacacatgtgagccaccacacctggcctacattttttttttttttttttttttgagacggagtttcactcttgttgctcaggctggagcacaatggctcgatcttggctcaccacaacctccgcttcctgggttcaagcaattctcctgcctcagccatccaagtagctgggattacaggcatgtgtcaccacgcccgactaattttgtatttttagtagagacagggtttctccatgttgatcaggctggtcttgaactcccgacctcaggtgatctgcttgcctgagcctcccaaagtgctgggattacaggcatgagccaccatgctcggccatctaaatatacttaatgccactgagctgcacatttaaaaatggttaagatggtgaattttatgttttgtctattttaccacaatgaaaaaaaattcaaagagaaaaaagattcaaagatgggcaacaatgtgaacaggtatttcacaaaaatttcacagaagagacatgaatcatgaataaacaggaaaaggtgctcaacttccctggtaatcagagacatgcatgttaaggccacagagggcatcattccatgtgacgagggctaggttggcaaaaatcaagccctatccatggatcttgattcatttaaaccttactgccgcccccttgggagattggtgcagtcactaccccacctacttattatttgaggggtaggtttgcaggtactcatatgattattttgctttataattgacatacacatcttctttgtatatatcaaacatatataattttaaaaactgaaaggcagggagaattggagaaggtaaaactcaagcagtcagcagggtcatgtgggccatggtgagggctatggtctttctcctaagaccgggggagtgtggtgccgggcagagaagtgatgaggtccaaattatatgttaaaaggatcatttaagaggccaggcacggtggctcacacctgtaataacaacaatttgggaggctgaggcgggcagactgcttgagctcaggagtgtgagaccagcctgggcaacatagtgagaccctgtttcaataaaaataaataaataaataattttttaaaaaaatgaaaaaagaggccacacacagtggctcatacctgtaatcccagcacttggggaggctgaggtgggtggatcacctgaggtcaggagtttgagaccagcctggccaacatggtgaaaccccatctttactaaaaatacaaaaattagccaggcgtggtggtgcacacccataatcccagcttgggaggctgaggcaggagaatcacttgaatgcaggaggcagaggttgcagtgagccaagatcatgccactgaactcctgcctgggtgacaaaagtgaaactccatctcaaaaaaaaaagaaaaaaaaagagctatagccatgagtgtccatcagagacagtgagagaggcaatgtcctgtcttccccaaagcccaacaaggttcaggagctgagatggtcactaatggggactgccttcaccccaggagcccactcctttgcctactcgtgctggacacggagccagttaaaccatcttggtcagattacatgagggagtgacagctgcggtggccccacgttgggggctgcacttaccaggctccaggcccagctcgagggtctcctcccgcaccacttgcaccagcatggccagcagcaggaagaggaaggcaaaggtgaggcagacagagcgctcacccccctcctcggcgctgaagtacagccgtgtcactgtcaggaacatcttgctggaggctggagctaaggaggcctcaggtgccactgccccactctgcccatttcaccacactccgtctgggaccccagaactccagggaacaagcactgctgcacaaataggccttggggatgacctagaggagttcggttttggggtgctggatctcagatcaggatgtgggctgggggttcccgttgagtgggagatggcctcatcaggccaccgtgtctgtacagcctcccgccctgggtgaccctgcctctttcacccacctcacctacttcacatcccttggaaaagcaatcagatatagaagggcttcatctccaatctgctgtcaaaatgcagcatgggggccagacacagtggctcatgcctgtaatcccagcactttgggaggccaaggcaggaggatcacttgagcccaggagttcaagagcagcctgggtaacatagtgagacccccatctctacaaaaaataattttgtggtagcccctgtggtcccagctactggggagcctgaggtgggaggatcgcttgagcccaggagtttgaagctgcagtgagccctgattgcaccactgcactccagcctgcacgacagagggatatcttgtctcaaacaacaacaacaggccaggcgcagtggctcatgcctgtaatcccagcactttgggaggctgagacaggtagatcacctgaggtcaggagtttgagaccagccctgaccaacatggtgaaacccagtctctactaaaaatacaaaaattagtcaggcatggtggcgcatgcctgtaatcccagctacttgggaggctgaggcaggagaatcacttgaacccgggagacagaggttgtagtgagcctaaatcatgccactgcactccagcctgggcaacaagagtaaaactccatctcaaaaaacaaaacaaaacaaaaaacaaaaaagcatgggaatctggggaaccagtggattttaagacaggtttcccactccaaaagtcacaggagtagcattctttctgtgcttcctcagacttgggtccccaaagtcatgtatttgctctctttgggaggccaaggcaggagaatcacttgaagccaatcaggaccagcctaggcaacaaagcaagatcctgtctcaacaacaacaacaaatatatatacatgtacatacatacacacacacacatatatatatatatacacacacacacacacacacacacaattttttggggggatgtagtttcgctcttgtcacccaggctggagtgcaatagcatgatcttggctcactgcaacctccacctcccgggttcaagcaattctcctgcctcaggctcctgagtagctgggattacaggtatgcaccaccacccccggctaatttttgtacttttagtagagaaggggtttctcaatgttggtcaggctggtcttgaactcctgacctcagatgatccacctgcctcggcctcccaaagtgctgggattacaggcatgagccaccgcgcctggctaatttttgtatttttagtagagacggggtttcaccatgttggccaggctggtcttgaactccagacctcaggtgatccgcctgcctcagcttcccaaagtgctgggattacaagcatgagccaccatgcctggagtatatattttttaaaattttgccaagggaccatatctttcttggccctgattgtggactggcctggtgatttccttaaacaaggagaatgtggtagaaagaatagggatggggtgggtgactttgggcaaggcattccctcctgcctcctggcatttctactgccaccaaagggcatgaccatgtggagtggagatgaaccgacctgctgagcccagcccagtctgtccacccacagagctggagcacataaaatgtctgcttcatgtcactaagcttggggaagtttgtggcacagcaggtgaaaactgccacaccagtttaggggagccagggaagctcaggtcctgctcccacccgccccactggcagggagcagagaggaaggatacatggagaaggtcaccgtgagcaggcaccagaacacagcaatgttagtctccttggctggtcccagcatgtagtagtaggcctctgtgaagaggtacacgccgcccgagtacacagcaaagtccacaaaccactggtactccaggaagaagcgcaggactgtggggggcactctgctcagccctggggcccagctcgctcccctcctaatagaacattcttccttcaaatcctccccacccccatgagggtgtggagaccttcagggctgagggagtagagtttagggatgggactgggctattacccagggcatccacggtcgtgagggggcaggtctccagctggaacggggcatctcggggcacagacagtggcttctcctcactaaggccattggcccacctgggaggatggtgacaagcaagagggacggtgagcacgcattccactgaggccagccaccctcagagctcagagcagctggcctggagaccatctctttccacaaccttggctcctctgcacactgggatatggggatccccccacccacccacaggactggctagagcaaactgccaggaaacagatgctaacttgacagtgaccatctccttggactagggtctcccggttcacctgtgcccagatcagcgcctggaagtatgggtgggccggtcctgtgtccctgagcccagagccccctgagcaggggtgaggccgttcctggggaggagccaccctcccaaggctggggctggggcccaggtcactcaccgctctttcctgcctctgggcctcggcttccccgccagggcccgaagctcctcctcagacgggtgcttgtatcggaacaaactgagagcaaggacgggcagtcagggaagctcaggcgtggggttgggaggttgaggcagtgaaccccaaatccagggattctagttagagggtagcctaggccaggggaacactgggaggtaggtgagggtacagcatggggaaattctggggaaatcgtgagaccaacagatctaggctgagtgggctccgggggcttggatacccctgaatctgctggctaactctcctggggaagccagtgtgtgcaacttttcttttctttttcattttctttttgagacagagtctccctctgtcacccagactggagtgcagtggcatgatcttggctcactgcaacctccacttccccggttcaagtgattctcctgcctcagcctcccgaggagctgggactacaggcatgcgccaccatgcccagctaatttttgtatttttaccagagacagggtttcactatgttggccaggctggtctcaaactcctgacctcaagtgatccacccgccccggcctcccaaagggctgggattacaggtgtgagccacctcgcccggcctttgttttttgtttttgagagaaggccttggtctgtcgcccaggctggagtacagtggcaccatctcagctcactgcagatttgactttctgggctcaaacgatcctcctgcctcagactcctgattagctgggatcacaggcgtgagccaccatacctggctaatttttaaaatattttgtagagacagggtcttgccatgttgcccaggctggtcaagtgatcctcccaccttggcttcccccagtgttgggattatgggcctgagctatcatctctgacgtgttttttttttttgcctttgtttttgtcacatacatttttctcaggagagaattcagttgccaccagattctcagaaagcatcacagacccacgcaaggacaaaaaccagagcaggcgagctctagcagatgcaggggtggaaggaaggctgggttacagggaggcaggaagagtgagggacgtggggagtgtggtgatggttccacacatgtgtacacctgtcaaaactagtccaactgtgtacttcaaatatatacagtttgtgtcaggcatgggaactcacgcctgtaatcccagcactttgggaggccaaagtggtaggatcgcttgagcctaggagtttgagaccagcctgggcaacttagcaagaccccatctctattaaaaatttaaaaattgtctgggcatggtggcgcacacctgtagtcccagctactcaggagattgaggcaggagggtcacttgagcccaggaggttgaggttgcagtgagctatgatcaggtcactgcactccagactgggtaacagagtgagaccctgtctctaaaaagaaaaagaaaaaacaaatatatgcagtttgttgtacttcaattacacctcaacaacgtttttccccccaccacccaccaaccaaaatcaaggctttgcaatttgtgaggcggggcgtggggagccagaagggggcgtgactccgcgggcccctcccaccgccggggcggggctcacctgccgttacagagcagccagcgcgcgaaggagcagtgtggcgccagcctgtgcatgagggtggcagtgagcagggtcaccaccagctgtactccgaggaccgcctggggggaggggacatgactggcagcacctgccagagggtcacaagttccctccctccctaggaacccaggctatttatagagaagtcaggctggatgggggaagggcgagcctcttaggctctagcggcttcttaggggagagtcctggggtgagtctggactcacctagcatggccctgccctcccacgtcagagatcaacacccaccctcaccacctagcgggagtgtagggcagtggagaccatgggatttgcctcccgcctccgctatggattcaggtataatattaatttcccggagtctcagttttctcatctggaaatgggtgcttcctatgtagtctcctgtattcctcaccaccaccttccagcccctaaccacgagcccgccacactcagtgaaagcggctcccaccgccttctgcaccccacactgtcacctagggagccactgcgtctcggttgagcttctagctttctccttcacctggtagctccttcccctaagtgtctcccaccttaagtgatccctgatggttccatcaccctcctccctcttcttccctttgtaattaacctccttgaaagggcgtctatgctcctggccacctcctgttttggtgtgaagacctacatgtctgagtggggtgagcttatttatttttatttatttatttatttttttggcaagggagtggtggggagaacagggtcttgctctgtcacccaggctggagtgcagtggcatgctggggtgctcactgcagcctcaacctcccaggctcaagtgattctcccacatcagcctccctagtagctgggattacaggcactcgccaccatacccaactaatttttgtctattttgtagagacagggtttctccatgttgccaggctggtcttgaactcctaggctcaagcaatcctcctgccttggcctcccaaacggttgggattacaggcgtgagccactgtgtccggcctatttttatttttatttttagagatggggtcttgctatgttgtccaggctggtctcaaactcctgggctcaagtgatcctcccacctcaacctaccgagtagttaggactacagtcatgtgccaacacacccagctaaggctttttttttttttaattaggaattttctcacccagttcttaattcagaacacattttcatatacttatttttaaacgttttagaagaatcagtctgtggtgaagctgggttttcctgcttgaatgcagtaaatacccatttgctgccagtaattacataattatgtaaaattatgtgctcaggagagctgtctactagtgttctggaattatcatcaaaatgaaataaagtttatttaatagtaaaattaattatgaaaataatcctttaatcaggcataaataagctaaatttagtcggaaaaaccctaatgtgatgggtaccgggcctagcacggtaattcaaaatgactgctgaggccaggtgcggtggctcgtgcctgtaatcccagcatgttgggaggctgaggcgggctgatcacttgaggtcaggagtttgagacgagcctggccaacatgatgaaaccttgtctctactaaaaatacaaaaattagccagacatggtggtgggcgcctgtaatcccagctacttgggaggctgaggcagcagaattgcttgaacctgggaggcagaggttgcagtgagccgagattgtgccactgcactccagcctgggcaacagagtgggactctgtctcaaaacaaaataataataataataaaataaaaatacataaaataacagactaataggacattttctctgtacctgtgacttgtaaactgagaccagaaatcttttttcagtaatgaggttggtggcggcatctttctcatctctaagtcctcattgctcgccctccccgggaccctagtgcagactggctggctggcacttagggaccatgagtgccagcccatgggcccctgcaagccagtgggtcagggctgttgaagccccacccttcccctaggaccctgccctcccaccccccagtctgtttttctcctctctctccgacctctctcctgtgacctgccagggttttaaccacccaatcagccagcccatcaaaacctcagcacggtgacacctccagcccagacctctctgctgagctcaaccagtagcctcctccaggctctcctgggagaccctagcactcacccatcatcccatacccttccaggtggttcaggcccttcccagtctcacagtcagcccccaacttggttctgcaccctgcaggcatagctagagaccatccctccacctccccacagctcagctctctcctcagccctccctgcacccaaccactggagtctcagaggtcttcctggacctttgggctcttcatcaatgaccccaccaccccccaaaaccccccaagggaaaaggtggtggaggggtgcatctctccacctaaggctcccagaggtctgtccagggatgttctgatggccctgccctccacccagcctcctgtctcagggtcagggctctgcagacatctgcaagaattttctggagtcttccatcagctccttcttttcccttcactggatttacgattctcgaactcaagaaccctgataaaatcaatgcagcctccctcctcattcccgggagcctgtgccttcatctcctacggcgtcctgcacctccgcctgggacgacgccccactttcaataattccggccatcagtgcccttccttcagggccatctccagcgcccctcctcggggatggtcccaggcagagaccctccagttccacgtccctctctctgcccaggccggtcccgtcagggttgtgggagtcccccatctccctgcaccagcctgacccccaggggctgggctaagttttaagaacacactcaataggttggacccagagccgcgtgagacctgaaggttccaactttcctgtctcccactctgagaaccttgcccgccctgaggccaaccagacctcctgagtccacctcccacggcctcccctgcccgttccacacaccccgatatagcagggacccccgatggatcctgtcggcgcggcccccacgctcctgcaggacccccgtccccagagtggacccccaacaggaccccacaccgccttaaccaggttccaaatgtgctggggtccccagtcccctctgtgggaccacgacccctcaaaaggatcccagacccctaaaaggtctcgagggcagaatccccagaacgcttaggggcttctagtccccctgggtacaactcccgccgactccctcggaggtcctgtagcgagagcagggctcccagagagggacacacggccttcagcgtgcccccgaatccctcagagcctccaatccccaagaagaaaccccaatccattccctcagtgtctccctggaccccttcggctggacctcggccctgcagaaccccccacttcgcgggacgctcgctcaccatgacgcgtgcgagaacgcggtgcactcacccaccggcctagggctccgggcactctgcggaaactcgaccaattagagcccgactctggtctgacgagcatcccgtccgaccaatcagtgtgtcttgagccggcaaatcaccagggacgaggaggccgctcgcgttgcatgccggaaattgtagttcagatacgctggttcggatcgatcaaagtgaagattgtgtctgggaggcctgcgtggccgacctctcttaaggcttagttttctctttcctacacttatctcaaaggtttgcagcgaaagcatttattcccacctaagggacatttctgagagtagaattccctccccccatcaagaacattcaatggctcccacttagtagacgaagtacttagtactcctaagtactaagtaggctaagtactcagactgaattcagacccttctgcctgacttaaatctgctgctagcactattgtgcaccctatagtacaacttgcacccaccatgctgtctcatacctccaggcctttgtaaatatcctacatcttgcaatgccttcaagaatgcctcaatcttaaaataaaaacaaaacaaaagcaaaaaagaatgcctcaatctttttcacctggcaagtgccttattcatctctatcagctaggactctggctgtgctccacaaaatatcaactaacatgggttcaagcaaaaaaggaaaatttttggctcatgtgacagaaaatactagccatagtgtcagcttcaggcgtggctggatcaaggaccaaatgtcagcttcagggatctgatgttctttatttcaccgctaggaggaaagggcttctggtgtttgtgccccggttttgccatttgtctttctgtggatgagtgtgtctgcctgagtgtagacatatattgggtatgactgagtgtctgagcatctttatgggggtgggttcctgtgtgtggggcctgagtaattaccttttcgtttttacattttattatgtatttgtgtattaatttttttttttcttgagacggagtttcgctcttgttgcccaggctggagtgaaatggtgtgatcttggctcaccgcaacttccgcctcttgggttcaagtgagtctcctgcctcagcctcccgagtagctgggattacaggcatgcaccaccacgactggctaattttgcatttttagtagagatgaggtttctccatgttgatcaggttggtcttgaactcccgacttgaggtgatccgcccacgtcggcctcccagagtgctgagattacaggcgtgagccaccgggcctggtttatattttatttttttaactttcggctggcaagtgctgaatcctaagcgcactatcgcacgccacctcgtggtggagggcaaaagcgcagtctccctgggatggagaagtcaaaccagtctcacttgtggccctgggggctcccagccttagaaagcggcccatagttttatggacctcacactgggtgcttagcctgtgggcactaacatcagggactggcctgacttcttgtccaccgtgagggtgagatccaaaggctgggaaggctctttctctctggccatgcctcagtttcccccagggtacccgctaccttgacccttttcctcttgctcagtccctggccctggtctggatgtgcggggttggggtgccagtgagtaggtaggtcttcagcccatgtggaaggaaggccaggatcattgtcggggaggtcctcagaacagaagggtgggtaactggctgaagagtttgcatcatctgtgcatgtagcagtggcgctgctggaggtggcaggagctgcatgctcagctggacctccacagccattgatcactgccatgaggaccgtggctcacccctcctgagtggggaagggacagaagggaccaggtgggaagtgttgaagacttgagtccagccaggcatggtggcttggcgtatgcctgtagtcccagctacttgggaggcttaggctggaggatcgcttgaacccagaattttgagaccagcctgggcagcacagcaaaacacccatctctaaaaaaaaattaaattaaaaaaaaagttaaattagcccaacgtggtggctcaagcctgtaagtcccagctactcaggagcctgaggtgggaagattgcttgagcccaggaatttgaggctgcagtgagtcgtgatcatgccacagcactccagccctggcaacatgacgaggaaaaaaaaagaggctgggtgcagtggctcatgcctgtcatccgagaactttgggaggccaaggtgggaagatcacttaaacccaggagttccagaccaacctgggcaacatggggaaacccagactatacaaaaaatacaaaaattagctgggcaggctgggcacagtggctcacgcctgtaatcccagcactttgggaggctaaggggggcggatcacaaggtcaagagatcaagaccatcctgaccaatatggtgaaaccctattgggtttctactaaaaatacaaaaattagctaggcgttgtggctcacgcctgtagtcccagtagtagtcccagctactggggagtctgaggcaggagaatcacttgaacccaggaggcagaggttgcagtaagctgagatcttgccactgcactccagcctagctgggcaaggtggtgtgcacctgtagtctcagttacttgggaggctgaggcaggattgcttgcacccatgagatcaaggctgcagagagctatgattgcaccaccgcagtacagcctgggcaatagggcaagacactgcctcaaaaataaaaaaataggccaggcgcagtggctcatgcctgtaatcccaacattttgggaggctgaggtgggaggatcacttgaggtcaggagtttgaaaccagcctggccaacatggtgaaaccccatctctactgaaaatacaaaaattagccgggtgtggtggcagtcgcctgtaatccgagctatttgggaaggacgagaatcgtttgaacccgggaggcagaagctgcagtgagccgagatcccgccactgcactccagcctgggcaacagagtgagactttgtctcagaacaaaaaaacaaaaaaaaaaacccaataataataaaaacaaaattaggccaggagcggtggctcacacctgtaatcccagcactttgggagaccgaggtgggtggattacctgaggtcaggagtttgagaccagccttgccaacatagtgaaaccccgtctccactaaagatacaaaaaattagctgagcatggtggcacatgcctgtagtcccagctactcaggaggctgaggcaggagaatcgcttgaacctgggaggcagaggctgcagtgagccgagatcgtgccattgcactccagcctgcatgacagagcgagactctctctcaaaacaaaaaacaaaaacaaaacaaaataataaaaataagtaagtagaaaagaaaaagaaaaaagacctgagtctgggttgggtgagcgaaatctctagccgcacttggacactctgcagaggcttcaagttcaccccatccaagtctcattccctacaagcttccacagcacagaggatgaaatgggagcttccagtcacccacggcacgctcttcccttcacctccacctccgagccgttctggagtcctggtgggtttgcctccacgcacacacagagagtgatcattccagggggcactgcctcccctcagctcccaatgccccctgccacgggagcctggggaggggcttttacacactttgatcatgccatatccctatcctggaaactggggccccaaagcccccacctcactggggatgagggtggcgaagatgacgtaggacaaaccttagctggggtctggggtgcagatggcatcctatactccgccgtataaacaagtgccccctccgggttctgtcacttatatactttgtccagtctccctatcccttaaaaggcgtcccgcccatcatcttgtctaggactgtgtgcgctaagggtgaaatgcaaggtgctcagttttactgaagaaatctctccctggggcgctgagtgacagaaaggattttgaaattgtcagtcaacgtaccccgcccattctggctgagctgtgccaaccagctcagctttggatcttggcagagtgattggaaagcaggtgagtttgtttgtttgtttggtttttgagatagagtcttgctctgttgcccaggctggagtgcagtggcgcgatttcggctcactgcaacctccacttcccgggttcaagtgattctcctgcctcagcctcctgagtatctgggactacaggcacacactaccatgcccggctaattttcgtatttttaatagagacgaggtttcaccacattggtcaggctggtctcgaactcctgacctcaagtgatccacctgcctcagcctcccaaagtgctgggattacaggtgtgagccaccatgcccggcctgtttttgtttttgtttttttactctttgagacggggtcttttgctctgttgcccaggctggagtgcagtggctcaatcatggctcactgcagccttgacttcccgggctcaggtgattctcccacctcagcctcctgagaagctgggactagaggtgtgcactgccacgcctggctaatttttttttttttttaagagatgggattcaccatgttgcccaagctagtcttgaactcctgggcttaggccatcctcccacctcagcctctcaaagtatttggattacaggggtgagccactgtccccggccaaggcggatcttgtaagtcttgatctcaacactcatgttttccgtcttcctgtccaaatctgtgaactccaactcacaaaggtgtttctcagcttgggacagtgtagaaggcgtcatggaggaagagaggcagagctgggccttggagggtgggaaggagtttaaaaaggagacaagttgggggttgagggaggcgctccaggaaagaccagtagggtcacatgttggtactgcaaatatttctaaggtactggagaggctgggacagggataggagaccaggccagactagggtagggcagctgaggagcccaacttccttctaaggatgaggaaaagcttcaaagagatgagcagaacatggcagaggcagatcttttaaattttattactgttatttttagagacaatgtcttgttctgtcactcaggctggattgtagtgggctggtaatagcccactgcagcctccaactcctgggctcaaggcatccttcctcctcagcctcccaaaggactgggattacaggcaagaagtaattttttttttttttttttttttgagacggagtcttgctctgttgtgcaggctggaatgcagtggcacgatctggatctcggctaactgcaaccaccacctcttgagttcaagtgattctcgtgcctcggcctcccaagtagctgggattacaggcatgggccatgaggcccagctaatttttgtatttttagtagagatggtctcaaatttctggcctcaagtgatctgcccgccttggccccccaaagtgctaggattacaggtgtgagccaccgtgcccggctagaagtcagttttttatgttgtcgttgtttttgatgttatttttgagatagggtctcgctctgttgcccacggtggagtgcaatggctcaatcacagcttgctgcagcctcgacttcctatgctcaggcaattctcccacctcagcctcctgaatagctgggactacaggaatgtgccagccatgcccagctaatttctttttaaattttttgtagagatcagggtgtcagtatgttgcccaggctggtctcaaactgctgggcccaagccatccatccactttggcttcccaaagtgctaggattacaggctttggccaccgcacccggcaagaagtcagatgttaagtattatgaagatctcactgaatgccatgtatggtggcttgcacctgtagtccagctactctggaggccgaggtgagaggattgcttgagcccaggagtttgagagcagcctgggcaacatagtgaggccccaactaaaaaaaaaaaaaaaatcccactgagaccacctggggtgcgtgaggccagatagaccctgctgcacctcaactattttctgggagcacccctgacctcaggacacccaagtctgtcttcacacacaggacaagccagagtgggggcagtttgcaaccccaggagtgggtatataaacaccctgctctcttgtcccctgggtagaatcaattgctgggtcaagggctcaagagatacacccattcaaaagatgagcagtcggcgaggctgggtggctcatacctgtaatcccagaactttgagaggcccaggagggcggaccacctgaggtcaggaattcgagaccagcctgaccaacatggggaaacccgtctctactaaaaatacaaaaattagcatggtggcaggtgcttgtagtcccaggcactcaggaggctgaggcgggagaatcccttgaacccgggaggcggaggttgcagtgagccgagatcgcaccactgcaatccagcctgggtgacacagggagtctctgtctcaaataaaataaaattaaaataataaaataaaaaataagaagatgaacagttcaggggcgcttccagcgccctgggagcccgacattcaggattcccagctgctgcttttgggagccctacgacccagccctagggcttgcccctgagcccatgacccacagcgccgggagcagccctggccattggccctggagtggaaagagccggggccctcacccctggagtgggaccattctaggtgcacgctcactctatgctgtccccagaaccccccgcgggctaagcaccctctgcttgtgcgcgtcccctgcagggctcctcccgccttgcctccccaaccctccacctggcagccctcccggacaccccacgggctcttgagtcctcgtctcagggcttctggagggggcaccccaagccaagactaggcaagaatgaggcgagtcacagtcagtctggtccacggacgccacgcgcgttttatttgtggatatacacacaaataggaagaaggaaaggagccccccagggtggattgagtccagccgcccacctccaagcccccaccgcggaggggggcgtcactgttgggtcttctctgaagaggcctggagggaggtggggtccccacgtgccctcgccgtacctggcgagcgctctgggctggtgccaccgggtgatctcctaccggggccagccgtcggccaagggcagccggcgcagggcgggcccaggccgcagaggctctgccagggaccgggcgaggagcaagggataggggaaggtcttaggaaagtcgccggggcccccgggggccggagagaggcgctcagacttgatgctgactgggggggtcggcggggaggcgccgcgggttgggggaccctcctcgcccaggcttcggcccccactgcagggggaaagagagagggaggccgtgagctcagcgaggaagggaaggaagccaggggatggcacagcgtgggcaaaggcttggcaggaggaccctgggaaaggagggggtggcggtccctcttggggcctcaaaatagctgcccatccgtaccggaagtgtgcgcagtaccagggatggccaccaggggtcagcagcggccggggctttggaggactgggacttgccgtcgtctcagggcacttacctgggctgggaggacacggcggggggcccatcacccctcgagggctgccagggggccagggtggggggctgcaacaagccagggggcggtggagggtctcccaggccatattctggtgggcaggaattgggggctgaggcctggacatctccttaagccttctgcaaacctaaccacccccagtgacagttttgagttctggtgggtgggagggtgtggaacccccagagggcaggagtgcggacgcttcccaggtggggcagggcaggttaggggatgtacctggggggcctccggggaggaaggggaagctccccagtgggggtccgggagttgcagtggagcaggggttctgcaggccactgtagaggcttctctgtgcggagagagggtgaaggggaaactgaggcccacacccaggtcgccctgcctgccctcatcagccctgccacaccctcccctcactcacggaggtgtttagtccccctcggggcccagccaggccaccaggcaggtctgacctccgcccttccgtcggcaggtacagtgggggtggtgtcttgctggtgaggtggcttggtgagaagagagggtgcaccaggcctggggaagaggagaccccagagagagaggacaggcaggccatgtcaactaatgaagtctgaggtttagaggtgatgcacgcagcctggcaatgccagagccaagatgcacccaaacagcccctcaggacctcacccctgccccactgtcccatgctcacctgggggcccggctttgggggctgctggtcggaagggagatgggcggctctgggcgggcagtgcttccccaagcccactggggtcacagcctggtggcggtaaggccccgtataccacatctgggctgggcatagcaggagctgcaggctgtgggtagagaagggatgggtcagaggaccccaggccagatgggggtgccaagtccaagggagaaaatcctgatgagttcaggggcccagctctaccttcaggaagcctttgctccacctcccaccaggctccctacctgctcctccccctgccctaaccctacaggctgggggagcttctgtctggctctgcctgtccttgacaggtaggtccagagccaagacctctcacttagtgtagagttggcactgagggggctgcacagagtgtttgatgaatcaaagatgaaatgaaggaaggaactgtttgcctgttgaactcttattcatccttcaaagccccagctacagtgcccacttctcaaagaagcctttcctgaccaaccaggtagagacctgcctccaaactctaggatccctggctctaagcccctctctcagtaccagcctcaacgacttgggcctaggaagtaggaggaatgcctcattcacagggccagggagtcacttacatacagccggggtcggggcaaggccggatcacccccttcgcctgccagcctccgaaacttctctcctggctcctcaggcccttcatccggctccagctctggcccatcgaggccaatgcccctccgcttcagcgtctatggggacaggagacaacagggtagacccttacccctaccccacccagggaacccagttctatgggagaggggacagaccatccccacccagctccatgagtggggaggaatgcaggcatggcctgctctagccaaaccccactgaccaaaccccggtgagttaccagctagcagtttcctcccctgggaccgaaaagcccaaggacctgcccagatcaacacagcaggagctgagatccatgcaggcctgttggcgctgtcctaatgctgctcctgacatgactccaggacctccattctgcccccacttgcagcctcatagcctggcatcaaaagctgcttaagaggccgggcgcggtggctcacgcctacaatcccggcactttgggaggccgaggcaggcagatcgcttgaggtcaggagtttgagaccagcctggccaacatggtaagacctccatctctactgaaaatataaaaattagccaggcatggtggcgtatgcctgtggtcagagctatttgggaggctgaggcaggagaatcacttgaatccgagaggcggaggttgcggtgagctgaaattttgccactgcactgcagagtgggcgacaaagcaagactcattctcaaaaaaagaaaaaaactgcttaagaaacgccagcagatttcctgagctgccttctcctggggccacagaaccgcatgctcccggaccccaacctcttctttgccaacttctgccccacacttccaaaacactgcggactcccaggcctagtcccagcccgctgctctctgcagcccttaggctttagcttcccatcccagtgaagactcctctgtcttatttatttatttatttatttatttatttatttatttatttattttttgagacagagtcttgctctgttgcccaggctggagtgcagtggctcgatctcggctcactgcaacctccgcctcccgggttcaagcaattctcctacttcagcctcccaagtagctgggattagaggcatgagccaccacacctggctaatttgggtatttttagtagagactgggttttgccatgttggccaggctggtctagaatccctgacctcaagtgatctgcccacttcggcctcccaaagtgctgggattgcaggtgggagccaccgtgccctgcccgatgtgctttatttctgctgtccccagaagggctcccccactcccaaatgtttggatgagtggagggtcccttctagggacagcagaaataaagcacgtcagccacaaagccagatgaagacactcatcttttgtgcaaaccaagagtccctgggctctgagaaagcagcgtgcacggggccttgtggggctggggaggaggacctggggtacctcgaggatgtcagtgttggtgcggctctcgtggggctcgctgtactctgtgtacttcagcagcacacggtccatgtccgtgctggcatactggaagaggcggttggcgctgttgaagatgatgagggctatctcacagtcacagagcacgctcagctcataggccttcttcatcagcccgaacttccgcttggtgaacgtcacctggacccaggacccacaggggcaggggagagaagaagaagagatgaatgtggggtggtgtaggggaattggcagggcctaacccttcctcgaacatgcctcaggattctttctggctgagctggtaattctcatgtcacaacctggcaaactcctactggagcttcaaaacccagcccaaatgtctgggaagtgtgccttggcttcccaggcagagtccacatgctctctctgggctttcccagttctgggcctccctctgttctggccctctgagttaggtgtggctgtgtcaagctccatctcccctatggctggggttccagtcatcagggagaataaatgaataatgatcatgaaaatgagcaggccaggtgcggtggctcagcctgaggtcccagcactttgggaggcccaggcaggaggattgattgaggtcaggagttcgaggctagcctgggcaacatggtgagacccctgactctactaaaactacaaaaattagcctagccaggcgtggtggtgggcgcctgtaatcccagctgttcggaaagctgaggcaggagaatcacttgaacccaggaggcggagcttgcagtgagccgagatcgctccactgcactccagcctgggcaacaaagtgaactccatctcaaaaaaaaaaaaaaaaaaaaaaaggaaggatggaaggagggatggaaggaaggagggaaggagggagggaaggagggagggagggaaggagggagggagggaaggaaggaaggaaggaaggaaggagggaaggagggagggaggggaaacaagaaacactgacagaccaggcgcggtggctcacgcctgtaatcccagcactttgggaggccgaggcgggcagatcacgaggtcaggagttcgagactagcctggcccacatggtgaaaccccgtctctactaaaactgcaaaattagctgggcttggtggtgcgcacccgtaatcccagctactcaggaggctgaggaagaatcgtttgaacccgggaggcagaggttgcagtaagctgagattgcaccattgcactccaggctgggcaacagagtgagacttcatctcaaaaaaaaaaaaaaaaaaaagaaaggctgacatggcatcaggactcctcatgcctcctcattcccctgcagttcaattggtcaggtcagtcccttgcctaggccatgccccctgctaggaatgtctttcccagccactgttccacccagtgaactcacctgccgattcctttggtccaggatgcgggagatctggatttttttcctccccatcgtcccaggctgagtggaatgatctttgtctaggaggagaagagggagaggacagagtgagtgggtggagagtggggaggggtaccccagcctcacacctctcctctgtctgcccctgccagccactgagaggaagatgatggggaaaatcaaggcaggctgggtcactgtcgcagaccccgcccccggccagccttaggatgcagtagaggctcaatgaacatgtttagaccaaatggggcatggtggctcatgcctgtgatccctagcactttgggaggccaaggcaggaggatcacttgagcctgggagtttgaggccagcctgggcaacatgttgaaaccccggctctacaaaaaatgcaaaaattagccaggcatggtggcacacgtctatagtcccaggtactccggtggctgaagtaggatgatcacttgagctggggaggttgaggctgcagtgaactatgatcttgccactgcactccagcgtgggcaacagagacccagtctttaaaggaaaaagaaaacagaataatagaaacgcctcctgctctagcaggaggatgcaggcacactctggaaaggcctccagctcagagtccttgggccagggtgtgggcctggcatccacttggtgacttggaagaaatcctgtaccccactcaaggagatgtgagatcgccctggtaggggtcccagaaggaggagactgctggactatgctggggtccaggccttccccagagacccccactcgaggttcctgggaacaatcgaatcatgtggcctgtcctgcagccgccgccctctgtacagacgtcccctgacaccacaggggacgtccccgctccgccaactgtgtgaccacactccacctcccagcctctaccatgtcacaggtgactgaggcttcaggcaaggggcctctccagggtcacgcggacctacgctcaggcctggccttccctctgaccctcagggcagccctcagcacagaagaccctttccccaggcctcagtttgctcttctgtgaatgggctggtaggaaatgctgagcacccaccaccaggcttggcaacaagttatcaagaaatccagatcaggccggtcacggtggctcacgcctgtaatcccagcactttgggaggccgaggcaggcagatcacttgagatcaggagttcgagaccagcctggccaacatgctaaaaccccatctctatttttttttttttttttttgagacgagttttcactcttgttgcccaggctggagggcaatggcgcgatctcggctcactaaaacctccgcctcccaggttcaagtgattctcctgcctcagcctcccaagtagctgagattacaggtgccctccactatgcccagctaatttttgtatttttagtagagacgaggtttcaccatgttggtcaggctggtctcaaactcccgacctcatgatccacccatcttggcctcccaaagtgttgggattaccaccgcatcctacccaccccatctctattaaaaatgcaaaaattaaccagctgtcgtggcgcacacctgtagtcccagccacttgggaggctgaggcaggtgtgtcactgcactccagcctgggtgatagagcaagactctgtctcaaaaaaaaaaaagaaaaagaaaaagaaaaagaaaaagaaatctggcttggcgtggtagctcatgcctgtaatcccagtattttgggaggctgaggtgggtggatcacgaggtcaggcgttcgagaccagcctggccaacatggcaaaaccctgtctctactaaaaatacaaaaattagccaggcatagtggtgggcacctgtagacccagctactcaggatgctgaggcaggagaatcccttgaacctgggaggcggaggttgcagtgagccgagatcccgagattttgacaggctgggcaacagagcgagactccgtctcaaaaacagaaagaaagaaatccagattgttctctgggagtgttctcagggcttcccagacccctgcccaagcggtctgggcaaggccctccattatcccagggcccagaagtgttagatacctcggctggcagatatggcatgctgtgtgaccccaggcacaccctctgccctctctgggctgggtctctgagcccccacaactatgtagagcccaagctgtcagtcccagaccctcagctccggcttgacttgctaaatttaacctccagggctaattttaatccccagccggaatcgggcctgttcccacggctgggatatgttgcccccaccctgatgggtccctggggggtggacgggggccttggtccggaggtcccagggccaagatgactccggaaatgcccctgatgcccagggtcccacgagagcagcagcagggctggggcttaggcctgagtctcttaagcctggaagacctgactcaagccccttctcactctgtctgtccccattttagacacagacaccatggctagggcagaggtcatgtgatgggggagaactgggaagtctctctctgcactgagaccctgagagctgagatagaaagtgagttccaggcagaaggaagagcaggtgccagggccctgaggagggacaagaaacagcgggagggtggggatgaggccacagaggttgggccattctaggactccttcttttgggtttccttcttttaatttaatttattattattatcattattttgagacagagtctcactctgtcgcccaggctggagtacagtggcatgatcttggctcactgcaacctctgcctcccgggttcaagtgattctcccgtttcagcctcccaagtagctgcgattacgggcatgcaccaccacacctcgctaatttttgtatttttagtagagacggggtttcaccatgttggccaggctggtcttgaactcctggcctcaagtgatctgcccgccttggcctcctaaagtgctgagattacaggcgtgagccaccacgcctggccatatttatttttttgagacagtcttgctctgttgcccaggctggagtgcggtggtgagatctcagctcattgcagccttgacctcccaggctccagtaatcctcccacctcagcctcctgaatagctgggactacaggtgagtgccaccacgccctgctagtttttattttctttttgtagagatggagtctcactatgttgtctaggttggtctcaaactcctggctggaagtgatcctcctacctcaccctcccaaagtgctgggattccaggtgtgagccactgtacctggcccactgtgggccttctgagctggaggagggctgtggattttggtctaagagtgatgtggagctatgagagcatattttattttatttcctattgtattttattttttatttttaatatatatatatttttgagatggagttttgctgtgtcaccccggctgaagtgcagtggcgtgatcgcggcttactgcaacctccacctcccaggttcaagtgattcttctgcctcagcctcccaagtagttgggacaacaggcatgtgccaccatgcccagctaatttttgtagttttagtaaagatggtgtttcaccatattggtcaggttggtctcaaactcctgacctcatgatccgcccgccttggcctcccaaagtgctgggattacaggcatgagccaccgcgcccagccttttattttattttttgagacagaggcttgctctgtcatgtaggctggagtgcagtggcacagtcttcacctcccgggttcaagcgattctcctgcttcagcctcccaagtagctgagattacaggtgtgcaccaccacacctggctaatttttgtatttttagtagagacagggttttgccaagttggccaggctgatcttgaactcctgacctcaagggatccgctggcctcagcctcccaaagtgctgggattccaggcgtgagccactatgagaaggttttaagcagagaagggatggggcttggtttattattttaagactcagctcatggcttccatggggagcaggtctgttggaggccagggtggagatcatgggcggctggagagaaggcaagggctgtgtccgtcttgacagagactgggggtagggccccctctgtgctaggcctgtgccttgcactttaagtcactgtactccagggtgcgttagtcctccagaagccagcaggccctacaccaactctggaggcaggcctgacaggtgcagatgaactcacgcaggagtttcactctcctgaaccccagtgacattggaaccaaagccatcctccactctagcccctgagggaatctacccaaccaaacacagctctgagcatggccccctcctgctcatacactctccatggctccccactgcccttatgagaaagttctagcacctagcctggcattcaagtcttcttcccaaatcagctcttgcctacttctctctcttcgataaatatctctgactagaaggaccctttcccctttttcaccaagccaactcctatccaaacgtcaaaacccagttcaaaaaacccattcctctaggaagtcctccctgccattcttctggtctcccagagtcaccatcctcctctaggtcagattccatggcattgggggtatatatatccagatttgtctcctccagactaaaagcccctctggatcagggccaggaatggacagtaaggtttggtgagcagagtagatcaacagagatgtcactgaccccctccacaaccctacagcttccctcaacaacttcctctcagactgccccagctgataccctgcccagaaatacatgcacatgcaaatccagccactcagcattgacctgtctcgggcccaggtgtgaagggccaggcaaagaatgcggaggcggcaggccagagtgtgcatgtatatttgtagtcacatgcaaatccctgcccagagccgcagacagaccctggtggcccattctccagatgttggtgtgatcggaactgctgggggaggtggcagcacaggctgaatgtgccaggcacgaggggggaagctgaggtttggggaggcctcttccgcacacacataccctccctgctttgtccagccagaaatcagagagctgtggcatctgcccagcgcagaagcacagaggtggacctattgaccaaggaatggagcacagaagaaagaacaggagaagaaacccaggagagcttcttgggggaggaggcatgtagttggatgtagacgcagaggctggatgggagcctgagtagaaggggagggaggtgggaatttgaagctaagagtccagtaccttcctactcctttcattgcaccctcatacttagcgtttattaagtatcaacctgtgcaagtcactgagccaagctgacctcagaagaagtagaaagcttaagtagaccaacaaccatagaagattagaaaggtgactcaggacctaccattaaaaaggtaataaagtgggctgggcatgatggttcacacttgtaatcccagcactttgggaggccgaggtgggaggattgcttgagcctagcggttcaagaccaacctaggcaacatagcgagacccctatctctaaaaaaaaaaattttttttttaaaggcaataaagttcaaggctgcagtgagctttgagctgctgcactccagccagggcaacagagtgagactctgtctctaaaaaagaataataatttcaaaattaaaataataactaaaaaacatgtttaaaggcccaggtggttttacagctattttctcaaatctcacagaacaggaaagtgcagcattatttcagtgaacttagatctttgaaatagacgggatctagccgagtcactttttttgtttttgagatggggtcttcctctgtcgcccaggctggagttcagtggtgcaattatagctcactgtagccttgaactcctgggctcaagtgatcctccagcctcagcatcccgagtagctgggattacagctatgtgtcaccacacccagcaaatttttaaaaactttttatagagatggcgatttgctgtgttgcccaggctggtctcaaactcctggctactcccagatacttccagctacttgagaggctgaggtgggaggattgcttgaggccagaaattggagaccagcctgggcaacacagcaagaacctgtctacaaaaaaagtaaaaattagctgcacgccgtggcacacacctgtagtcctggctatgtgggagcctgagacgggaggattctgtgagcccaggagttcaaggttacagtgagcgatgatgatcttgtaagctcttccacttccagctctcatgcattgctggtggcagaggaaaaagggacaagcacttggataatcctctggcatctactaaatctgaacagatgcctaccctgtgacccaggaattccgctcctcgatgttcaatattcacgcaagagaaatgggtccaagttacacctgaggacacagacaagaatgttttctacagcttcatacatcattgcctcaaactggaatcaacctggaagcccttaatgggagagctggtcaacactttcttgttgattctatgatcagttatagcacagcacagaaaaagggtgcactctcgctgcacacaaccacgtggatgaatctcagagaccattggccaattcgacgatcccagactccatcgagaagatgcactgtgtgattttatttacatgaagtttcagaacaatcaaaactcactgatgcagctgggcgcaggggctcaagcctgtaatcccagcactttgggaggccaaggcgggcagatcactggaggtcaggagtttgagacaagcctggccaacatagcgaaaacccatctctactaaaaatacaaaaattagctgggcgtgctggcatgtgcctgtaatcctagctactcgggaggctgaggcaggagaatagcttgaacccaggaggcggaggttgcagtgagccaagattgtgccattgcactccagcctgggcgacagagcgagactctgtgtcaaaaaaaacaaaaaacaaaaaaccctcactgaggctgatggatatcagacagcactttggtcaccctgggcagaagctgtgattaggcagtggcccaagggggaagtcccaggggctagggaagtcctgttcctggatccaaggtttgggtacacagatatgttcagtttgtgcaaatgtgttgagctcaactctagtggtttgtgcatttttcttcgtgtgatttatttcaaaaggaagatttctttttttttttttgaagtggagtctcgctctgttacccagactggagtgcagtggcatgatctcagctcattgaaacctccacttcccgagttcaagcgattctcctgtctcagcctcctaagtagctgggattacaggtgcctgccactgtgcccggctaatttttgcatttttactagagatgggttttcaccatgttggccaggctggtcttaaactcctggcctcaggtgatctgcccacctcaggggccaaagtgctgggattacaggcgtgagcatgggcgcccccggcccaaaaggaagatttctaaaaagctccagccagagcaacatagtgagaccctgcccctaaaaaaaaaaaaaaaaacaaactagggccaggccaggcacggtggctcacgcctgtaatcccagtgctttgggaggctgaggtgggaggatcacttgagcccaggagttcaagaccagcctgggcaacatggcaaagccctgtctgtaggaaaaaaaaaaaaaaattagctaagtgtggtggcatgcctgtggtcccagctactcaggaggctgaggtgggagaatcacttgagcccaggaggtggaggttgcagtgagccaagatcacaccactccactccagcctgggtgacacagccagacgctgtctcagaaaaataaataaacaaaaataaaaaaatttagccaggcgtggtggtgcaccccttagtcccagctactcaggagtctgaagtgggaggatcacttgagcagggggaggcagaggttgcagtgaactgagatcctgtcactgcactccagcccgggcaacattgtgagactgactcgaaagtttttttttcttttttttgagacagagttttgctcttgtcgcccaggctggagtgcagtggcgcaatctcagctcactgcaacctcctcctccccagttcaagcaattctcctgcctcagcctcctgagtagctgggattacaggcacacaccactacacccagctaatttctgtattttcagtagagatggggtttcaccatgttggccagactggtctcgacctcctgacctcaggtgatccaccagtctcggcctcccaaagtgctgggattacaggcgtgagccacagtgcgtggcctaaaaaaaaaaaaaaaaaaaaaaaattaaatctagcggggcatggtggtgcctgcctgtagtcccagctacttgggaggctgaggcgggaggatcacgtgagcccaggagatggaggctgcagtgagctatgagtgggccactgcactccagcctgggtgacagagtaagaccctgtctctaaaaataaaaaagctccttgctgcttatggctgctgtggggagcagtgtctgttcaggctagagtgaggtgacaggaagaggctgggccagtgggaaatacagagtttgaatggagacaggggtggcacctgggcagaagtggtgaccaaagggtgcaggatgtgctggtgacctgggatagaagaggagcctggtgatcccaggcctgagcgatgtgggggtgagggggaattgggaggacaaaagaagagctcaggagtgcggaagcatcagaaactttctggcagtatctgtggtcactaagtcaatcaacaaacattaccctgaagtccttcaagccatagattatcatctccccagcctggcgaggccccttagccccccagtaatggagatggggtgctggagggaatcccacccttccactgacccttcccctctggcctctctgcgtggtaggactcagttctcttacctgttaattgggggtgagaatccttctcccaccagctgggaagagggtagggagcaggggtctactgaactttttttttttttttttttgagatggagtctcgctctgttgcccaggctggagtgcagtggcgtgatctcggctccctgcaaccactgcttcccaggtttaagcgattgtcctgcctcagactcccgagtagctgggattacaggtgcacaccatcacacccagctaattttttatatttttggtagaggcggggtttcagcatgttggccaggctggtctcgaactcctgacctcaagtgatccgcctgctttggcctcccaaagtgctgggattacaggtgtgagccaccacacgggggcctctattgaacttttcttctggcttctgggaaaccaaaaggaagaaggtctgggccttggaactgggggcgctgagtcagtacagcatcctgcaagaccaccttgaaatactgtcatcagtcacctgcttcctcccccataaaatgggtcacaggatcctaacctcacaggctttgcagaggggtttaagagaaaagattaggaacaagtcaagttccctttcttggcacccctgcgggactttactggggggatgagctgcagagtcacttcgccagacccctgagcccgcagggaggccacggcttggcagaggaacccaggccgggaaaggagaagtgagaggcaggtgggttgggtgggggtgggggtgagggcccgcgggaggcggtgaagcggggagggggcgctgctcccggcccctgcagcgaatcaggcctgccgccccgcctcacgcaacccaggctgtggtttcatcacctgctccccaagtacctcattatgggcgacaggaagagccccttggaaagccaggacccctcctcccctctcctgggggctccagcggctccgaccccagctgcaggcgaccctccctccccagccagagccctgggcccgcctcctccccgggggcctagggaggtggtacccaggtgggggggcatgtaggtgacctggcggcctggctcagttcacagcggtccctggagccccgcacctgccctcagggactcaggggagacggtgggctcgggcagtgactcccctgttgctgagcttctctggaactcagtttcctcctccagaaagtcagggggcagcaggggccacctcgctgaactggggggaggggcttcacagtaaggtgctttacagatgcggggaggatttgtggtcgatgggtcctgatgcctctcagaaggccttggggtcacctctccatcctgggggaacccagctcagattgcgggccccaaaaagtccctggtggagtgctgagggacaggggcggatggggttgggggtcactccatccttgtatgggcataatgggaggtagaaatattccccacacacggagacccccaaacagagccgcagaaaatccacagatgcccgaaacaacagatcccccaaatacacaagtattcctcctgcgaaagtccccaaaatacatgcagttcacgatacgccaaaccccccaacccacacagctctccaaacacacacatccccaaaacacatcctattccctctgcatagacagaccccaaaaacactcagacatacccagatgccccaacacatgccaatcccccaaatgcacagacacatacagatctccctaaacacatggccgtcccgcaaatacacacagacccctttcccctgaacaatgtggagacccccgccagacgcatgcagactcttccaaacatatgcagactccccccaatccatgctggtcccccattacataggtagggcccccccatccctgcagtgataccacccacactctagctttcttcttttttgttttttttttttgtgagacagagtctcactttgtcacccaggctggagtgcagtggcgtgttctctgctccctgcaacccctgcctcctgggttcaagcgattctcctgcctcagcctccccagtagctgggattacagccatgcgctaccacacccagctaatgtttgtatttttagtacagacagggtttcaccatgttggccaggctggtcttgaactcctggcctcatgtgatctgcctacttcggcctcccaaagtgctgggattacaggccaccatacctggctgggtttcctctttttaattattattatttttttttgagatggggtctcgctctgttgcccaagctggagtgcagtggtgccatcatagctcactgcagcctccaattcctgggcttaagcattcctcccacctcagatttcccagcagctggggctacaagcgcacacctaatttttaaccagactatgccaggctaattttttttatttttgtagagaaggggcttcattttatcacactggctggtcttgaacttccggcctcaagttatcctcctgcctcagcctccctaagtgctgggattacgggtgtgagccaccacacaggcctggctgccttcccaaggccgggtgctctccacccaccaggggtgaaatgcaggctgggggcatctgaggctagatttgaatgggtagtgtttgaatccaggattcttagaatgttccagctggagaaggccccatgggggtccttttttccataggtccctctggcacccatggggaaagtgaggcccagtggggagccctcagaccctccttcccacctctccctgggcctgctcctgggagggacagctcctgttcgaggggcaggagtccacggtgagtgggaccctctgtgggacgccccctctacttcactccaggatcccattttggccatgcacagagaggccagggccggggctgtaggccagtcagtccaggattcaaatcctaaacccgccacttgcccactgcgtgatactttctgagcctcggtttcctgtgtttgcaggggtccccacaaactccccatgtacccacccacctctcccctcacttgaaaaggtgtcatctaccagcagactcccagcccaccttctgcccctttgggggcatctgcaacaccagccccaaactgattccctacttgcccatcactctccctttgcccggactgtgtccaaccccgggacacccttctaggtttgcccaagtccaggagtgtctccatgtcctctaaagacctgcagaaaacgctctttctggaggcatcaatcttttttaatatttattttaattttttcaggcagggtctcattctgtcacccgggctggagtgcagtggtgtggtctcgactcactgcagcctggccctcccggactcaagcgatcatcccacctcagcctctggagtagctgggagtagcacggcgccacacctagctaatttttgtatttttttagagccggggtctccctgtgttgcccaggctggtctcaaactcctggtctcaagtgatcctgctgcctcggtcttccatagtgctgggattacaggtgtaagccaccacgcccggccaaattcaactctttctgcagcacctcagccctatcagactttttggtgtgtgtttctttattgctttctttgatgagcatctcgccctgccggcttcccagcgcctagtacatagaaggccctcaatcacccttccttgaatcaacgaccaaacaactgcttcacagacagaagaaacactgccaacttgctcagttttctgtttttcttttttctttttttgagatggggccttggtctgtcacctagactggagtgtaatggcacaatctgggcctactgcaacctccgcctcccaggttcaagccaatctcttgcctcagcctcccgagtagctagggctgcaggcgcctgcccctccacatggctaattttttgattttttgacatcttattttttgtagagacagggtctcactaggttgcccaagctggtcttgaactcttgagctcaagcaatctgcctgccttggcctcccaaagttctgggattatagaggtgagccaccacacccagccctacttgttttttcttgagatgggtttcgctcttgttgcccaggctgaagtgcagtggtgcgatctcagctcaccgcaacctctgcctcccgggttgaagcgattctcctgcctcagcctccctagtagctgggatcacaggctcgcccccaccatgcccagctaattttttatttttagtagagacagggtttctccatgttggtcagaatggtctcgaactcctgaccttcaggtgatccacccacctcagcctcccaaagtgctgggattacagccgtgagcccggccctacttgttcacttctcactgaaacacctcatggtccacacaacaaatttaaggccccatccagcccacaggctgccagtttgtggcccttcctctaaacaaccttcacagcaaaacagccaattggacagtgctgatgctcctctcaggccaaggaactggccctctgaaggtcccactgcccagcttgggagaaaaccacgtccaggtgaccatccatggcaaacctgacctggcacaggcaccctcacctgccaagaaggcctgttccaggccgggtgcggtggctcacgcctgtaatcccactactttgggagaccgaggtgggcagatcacttgaggtcaggagtttgagaccagcctggccaacatagtgaaaccccatctctactgaaaatacaaaaattagccgggcatgatggcgggcgcctgtaatcccagctactcaggaggctgaggcaggagaatcacttgaacccaggagtcagaggtcacccagcccatggagccaagacagaccccgcagtctgaatttgaccctgctgtcccatgcaggctagagtctaaggccctctcaggcccctagtgatgtcccctaagccacagtagtggctgcagggacagcccaaggttttcctctctttgttccagagaaagctctccctgcggggcctcagaaatggatccccagatgccccagcctccctgcttgggaaattagcacatctgtcagcgctgggcagaagggaccctgcccacagcccggcagcccgaagatgcagccagcagggaccccgagatggggctttaggacactgtcagtccccaatatcttcccgcagaaatgtctaggagcccctcaggtgctggggatgcaggagcagggggtgggcagagcaaggcctccccccatcacccagtctgatgggggaggcaacagcagccacataaccgtatctgggaagacggccttcaaggaagaaattcaacagggggaggcagtggagggtggcagggagagagctgctttggacagaggatccaggagggtaccacacctgtaatcccggctactcaggaggctgaggtatgagaattgcttgaacccgggaggcggagattgcagtgagccgagatcgcaccactgcactccagcctgggtgacagagcaagaccctgtctctgaggtgtctcagggaggtgggagccaggtggacacaatggcaggtgcaaaggccctgaggtgggactgtgctaaacaggtggcttccaggagcaggcaaaccccacacatctggggtggagtgagccaggagtggccagagacagagaaggtcagagaggcattgggggacagagagagggtggactgtagagcaatagggagccatggaaggtgtgtgaggagggggaggactgtggtctgatttggaattttcagaagaccctgtggcctgttggagcaggaagccaggccagcatccagccagggatggtagggcttggaccaggcacaggccacaggttggaacagtgggcaaggcaggcccatgcccacagcagccatgactcttattacaatccacctccatttctcccttcctcaggccccaccttgaccttgggtgaaactgggcttggagggaaacagcacctggcagagggcagagaggaaaggggcctggatgggctcacaaacacctccacttggtcacagcccagatgggaccttctgttattgagcccttactgtctgcccgggcccacaccccgcctcatttacatataagacctgcctgacccccagacaccccagggaagcagcgatagttgccctgttttgcacaggagtgggcaggcttcttccagggccacatggtgagacctccagatccccacccaatcctgggcttgtaccccagggccatcacgtggcacctcaatctcaccacccccacccaggctgggaagtgggcctgggcttgtccagcccagaatcaccgtcacagggtccaagaaactcaatcctgggccgcagggtatcagggtaaccacacaagtccccaagatacagccccagagaggccctttgggggctgagaaatgggatttaacttccttgcccaccccatggggaatcatgggccagggctggggcgagttccctgaccccaaaagggatcccagacacatttctaagtcgtctcagaaaaatggcatctggttgggctcatgcctgtaatcccagcactttgggaggccgaggcaggaggaccatttgagctcaggagttcaagaccagcctgagcaacatagggagacccccccatctccaattaaaaaaaaaaaaaaagccaggcaaggtagcactcccctacaatcccagctactcgggagactgaggtgacaggatggcttgagcccaggagttcaaggtcacagggagccatgactgcaacactcaaggaaagacagaaagacatctgtctctagaccactctgtgccttgaatcttccagaagggcagggcgtggtggctcatgcctctaatcccagcactttggaaggccgaggtgggctgatggcttgagcccaggagttcgagaccagcttgggcaacatagggagaccttgtctctataaataaataaataaataagtgggccaggtgcggtggctcacgcctataatcccagaactttgggatgccaaggtgggctgagtgcttgagtacaggaattcacgaccagcctgggcaacatgacaagaccccatatttataatttttttttttaattagctggtcacaggctggccacagtggctcacgcctgtaatcccaggactttgggaggccaaggcaggtggatcacctgtgatcaggagtttgagaccagcttggccaacatggtgaaactctgtctctactaaaaatacaaacattagctgggaatggtggcacgcacctgtaattccagctactcaggaggctaaggcagaagaatcgcttgaacctgggaggtggaggttgcagtgagccgagattgtgccactgcactccagcctgggcaacagagtgagactctgtctcaaaaaaaaaaaaaaaaaaaaaattagctgggtgtgctggtgtgagcgcgtattcctagctcctcaggaggctgaggcaggaggatcacttgagcccaggaggcagaggttgcagtgagctgagatcacaccactttactctagcctgggcaacagagcaagatgctgtctcaaaaacaaagaaagaaagaaagaaagaaagaaacctcttccagaaggccaaacacccaacatgtctacactcactgcacccaagttggggtgagcaaatgttttaaattccccttctcttcttaatttgcattttccagatgtccacctggttgggtcatagtttaaccaaataaatcattcgttgggatgggaaagccaagagtgggttcagcttgctccgctcacaggagctgccacaaagttcagagaggggcagccacctgttggggggtcacacagagaggagggagaggaagctgggcctcgtgaccccagcctctgttctcttgggggactgaggcatggccttgagctccatccttttttgaggggcctagtgttactacctggcctcagccttccctcctgcaaaccagcttcctgctctctaagatgacatcccaagatcctaactgtcctgaaattctgtttgctggaggccaagcttccccctttactgaacaacaggaaggggacatgagggaacaagcctgcctttttagaaagcccttttcatctctggaaatcagtcctcacacactggttctccgaagtcgaaatacttttttgtatccagtttccttcactccaagagtctgagagttcttgtcccgaatgcccaaggtccaggggccctgcccttccccagggatgattcttggccaggctagcctgaggccttgattattgttttgtttctttcttcttttttttttttttttttttttgagatggagtttcactcttgttgcccaggctggagtgcaatgacacgatcttcgctcaccacaacctccgcctcctgggttcaagcgattctcctgcctcagcctcctgagtcgctgggattacaagcatgtaccatcatggccggctaattttgtatttttagtagagatggggtttctccatgttggtcaggctggtctcgaactcctgacctcaggtgatccgcccgcctcagcctcccaaagtgcttggattacaggtgtgagccaccgcgcctggccatttttttgtttcttttctttctttttgtttttcttttagagacaggatcttgctctgtcacccaggctgcagtgcagtagctcagtcatagctcactgcagactcgaactcctcggatcaagtgatcctcctgcctcagcctcccgagtagctgggactatacacataagccaccacacctgcctaattaaaaaaacaattttttttggccagatgcggtggcttactcttgtaatcctagcactttgggaggctgaggcaggcagatcacatgagaccagcctggcaaacatggtgaaacaacgtctctacaaaaaatgcaaaaattagctggtcatggtggcacacgcttgtagtcccagatactcgggaggctgaggcagaaaatcaatcacttgaacctgggaggcagaggttgcagtgagccaagattgagccactgcgctccagcctgggtgacagagtgagactctgtctcaaaaaaaatttttttttaaagccaggtgcaggggctcacgcctgtaatcccagcactttgggaggttgaggcaggtgaatcatttgaggtctggagttcaagaccagcctggccaacatggtgaaagcccatctctactaaaaatacaaaaactagccaggcggtagtggcacgcgcctgtaatcccagctacttagaaggctgagggaggagaattgtttgagcctgggagctggaggttgcagtgaacaaagatcaccactgtactccagcctgggcgacaggatgagaccctgtctcaaaaaaaaaacaaagaaagaaaagaaaagaaaaagaaaatgggggtctcactatgttgcccaggctggtctcaaactactgggctcaagtgatcctcctgcctcagcctccaaagtgctgggattacaggcatgagccacagtgcccggccagctatttctgactaattgggtctgcaactaggggttagggtggccaaggacacaggtcacccatatctgcagccctggaccccaaaagagatagggagggaggactgtgaccgtgaaagtaatgctgccaccaccttgtcatgtgctaacaaccacacggggatgtgactcttgttcctgtacccattgaggcaaagggaggagagttggccccggcagctgttgctcccccgttccaaggttttgtgcctaccatcctgctgtgacaaacgagtgtacacccacagcaagaaggcatagggttgtgcacaggggatgcgctaatgctaaaggagtgcacaccaggagagagggacatcacatgccacatcacagagctcacagacacataatagggcctcacagcaccatgattttggacacacagctaactctccaactccccaactcacaccaaatctcagacgcagagcccttggacacacaacttccagacccacacccttcagacacacaccccttggagacacaaccccctcctgccacaacctcggggactcaccaccccacgacacacacccctttagacacacaccccaccctgggacgcccagcagtacacccggacctccaaaacccacccagcccgcagaagccgttcagaggacaccacaggagtctcaacccgatatgacacgcacctgctcggcctgggccctgggacgctgggcgcacggacccgcggcggctgcacgaagatcaggggcccgcggccgcaggtgccttgggagcgggcggtcctgcccccgggagctgattgggcgggacgggcttatttgcatacagggcgtcaccctggaggcggcgatgggcgtgcacttgggcgtggccccgacccgggagttcatgggcctgggactcagacgcgaaaggatgctggggcgccatgggtgggggcgcggataaggaagaagcagaacggagggagggggctggatcagactggccaggctttccccgccctcactgggcgcccttgaccttactgccgacccctgaccctactgtgaccctaaccctaattctaaaccttttcctaactcggcccaacttgcctggattgattccatcctgagtgaaatagactccgatcccggaccccgtcgccccgaggaaccaagcccttctcgcaggcaacgctgaccctcgcgctcgctagaatggaaagactgcaagacggggctctcgggtggcctgtgtggcctcactcaactgtgcctcctggggccagatatgtgctcccacagggagtgacagaccctccgcagctactggtccctcaagcccgcaccgcctgcccctccacagtccaagacaaccacactgcttccaccaaccacttccctctccttacctctccccgctaaaggctgttttctaaacttcaaaggtcagctgtgaggggccttccaggattggaccccagcccagaactctaaatccaccccttcccctgggatcccagcacaggccagacccacaggaagatcagagcaggggttggtgaatgtatcaatgtgaaaagaattacaggataaagatggctctgggatgggcacttctggagaagcccccggcccgtctggggcaggcaggggatccatgcactcccctaaccctgtggggtcaggcttgggccagaggagggatgggaggctgggacaggccagaattggggcaagggctgtgccagaggagtcagggagggtttctcagaagagagggcatttgtgctgggctttcaagtatgtgtaggagtttgccactaggagaaaggtttttcttgtttttttcttcaaggcaggatctcactgtgttgcccaggctggagtgcagtggcatgatcatagctcactgcagcctcgacctcctaggctcaagcaatcctcccaacttagcctccccagcagctgggactacaggcaggccaccaccaggtccagctaattttgttttttttaagagaggatgtctcactatgttgcccaggctggtcccaaactcctgggcttaagagatccttcctcctcggcctcccaaggtgctgagattacaggtgtgagccactacacaagacccgagaagggctttttcaagagggaaaagcacttgcaaaagtgcagaggaagagcatagaacattctctggccggggaagatgaggaaggtgaagccagtatagcgggcagggggtgaagaggaggggcagatacaggtggagagcaatggggctgcaaagctgcctggtgtccatctcctccagagaagagaggggctggtcccccaaactcagggggaggcatgtggcagatgctggagtgtgggggacactgagacagggaacagggggcctgggaggcttgtgtctctccccacacctcagtttacccgtctgtgacatgggcagtgtgggcctctagtctgagcacaactttctctttggacatgaaaactatagagttcatactgtgtcatcagtgggtccctcctgtccccatccagtgcccagtgccatacactggggtgccccaaggacatgccagggcctgggccaggctgggggcttctgcctccactccatggtgcagaacaaggcttggggagtgtggaggtggctggggagccctgggcccccggagggctgctctgtttaccggaggccacccgcccacctctgatgcaacaggcaggctctggttacgtgaggccggcagctgggccagctctgggggaagggctagcccagcagagcgaagctggctggggctggcccttatgcaccccaactccccagccccctccttctggtgggcaccatcttgttattcatggtctgtcccgtgtccttttgcctctgttcctatcctataccttccccaaccactaattgtgtcccctagcagggccaccaagagtcttaacctcattcttctcagatgaagggacacccttagttgctagagtaagaggttggaaggtagaagggaaggttgtgaggaggaagggatagaagggtccagagtgggtggtgagggagaagagtgacctgggaagcaggtctgggagatgggggaggtggtgggtgggggatggaggagaaggctagggtgggaggctgggggaggtggagaagctgcccccgctgtctccctcctccagattctctcccctctcccaggagaaggctttgaaggaccttccatgataaggatgtgtgacccagtaggtagggagggccctgaggttaaagaaccctgagtccccatcccagctgtgccgcccactcactgtgtgacctcaggatggtcactgcaccccttggggcctctttgctcatatgagaagtgtggataggctgggcgcggtggctcacgcctgtaatcccagcactttgggaggccgaggtgggtggatcccgaggtcaggagatcgagaccatcctcactaacacggtgaaaccccgtctctactgaaaatacaaaaaattagccaggcgtggtggcaggcgcctgtagtcccagctactcgggaggctgaggcaggagaatggcgtgaacctgggaggcggagcttgcagtgagccaagatcgtgccactgcactccaacctgggcgacagagcgagactctgtctcgaaaaaaaaaagaaaaaaaaaaaagccaggcatggtggcacacacctgtaatcccagctactcaggaggctgaggcaggagaattgcttgaacccgggaggtggaggttgcagtgagccaagatcacgccactgtactccagcctgggtgacaagagcaagactctgtctcaaaaaagaaaaaaaaaaaaaaaaaaagaagaagtggggataataggagcccttaaggcccacctccaatgttccctcctccaaaagccttcctatcctcttaccacttaggatccttccacctccccacccttccttccagcttagcactgatccagggggcggggtagagtatgtggctggttctgtgtcccccagcctgggggttccttgggcccgggcccagtgcatggtggcaccaaaggggtgtctccacgggtttctttcttttcattttttagagacagagttgctctgttgcccaggctggagtgcagtggtacaatcatggctcactgcagccttgaactcctgggctcaagtgatcctctcgcttccatctaccaagtagctgggactataggaatgcactaccacacctggctaatttttaaatttttttttgaggtgcactgggtgtctcgcttgttgcccaggctggtctcgaactcctgggcttaagcgatcctcctgccttggcctccaaaagagctaggattatggatatgagccattgcgcacagcctccatgggtttcttgaagaactggagaatctcaaagaaggtctaagcagtgaaagggagtgggggataagcctggggcacccagaagccttgttcagggatactgtagggaaaagaaaaaaaaaaaaaaaggctttccaggggcctgagtgtgcaggactctccgggaacccagaggagtaggtctgaaataaaaaccaggactcacaccaatggctaaggacaaaaacccagcggaagtctgattcttgtcctgaccactgtggacggagcagggggcaggtcgctgccctgtatgggtctccttttaccccatctgcagatcagggttgggatcctttctgggtgatctccagcctcgtgagcactatgcttctgtttggatgccccatggcacggagagctcactgtctctcttctagctgcctatctctggagttctgccgggagttaaattttttttttttttttttttgagacggagtctggctctgtcgccaggctggagtgcagtggcgcaatctcggctcactgcaatctccacctcccgggttcaagtcattctgctgcctcagcctcccgagtagctaggattacaggtgctcaccacagccagctaatttttgtatttttagtagagatggggtttcaccatgttggccacgacggtctcaatctcctgacctcgtaatccacccgcctcgggctcccaaagtgctgggattacaggcgtgacccaccatgcccagctgggtgttttttgaaatggagtctacctctgtcgcccacgctggagtgcagtggcgtgatctcggctcactgcaacctccacctcccgggctcaagcgattctcctgcctcagcctccagagtagctggggattacaggcatgcaccacacccagctaatttttgtattttcagtagagacgaggtttcatcatgttggccaggctggtctccaactcctgacgtcaagtgatccgcccacctcggcctccgaaagcgctgggattacaggtgtgagcccccgcgcctggccagtaaatgctattgagtgagctctaggagtgcccttgctctccaccctgacaagggaggctgcgagctcttgttctgagagccctctggcctctcagaacctcagtttgctctctgaaaaatgggagcgagggcatatagggtgaaaaagggtggagggtcacagtgtgcccaccagggccagccaggactgcagacaatgaccgctaggaggctgaacttcccgccaacgctttgcctcttgcgccccctggcggctagagtgggcggggcgccctccaggcaaaaagggctatcgagcattcaaatgagatgcaaattaaccagcgcccccacaagcccttggactcggggtgacgaggtgtctgacaacccagagtcttgatcagatcccttttatctatttatttatttattattttttgagacagagtctcgctctgtcacccaggctagagtgtagtggctccatcttggctcactgcaacctctgcctcccgggttcaagcaattctcctgcctcagcttcccaagtagctgggattagaggcgcgcaccaccacacccggctaattttttatatttttggtagagacagggtttcaccatattggtcaggctggtcttgaacccctaacctcaggtgatctgcccacctcagcctcccaaagtgctgggattacaggcgtgagccaccatgctcagctattttgtttttttatagagacagggtctctccatgttgccaggctggtctccaactcctggactcaggggttcctctagtcttgacttcccaaagtgctgggattacaagcgtgtgccaccgcacccggcctagactccttttaagagatgactgggctgggcacggtggctcacacctgtaatctcagcactttgggagaacgaggtcaggagttcaagaccagtctggccaagatggtgaaaccccgtctctactaaaactacaaaaattagttgggcgcagtggcaggtgcctataatcccagctattctggaggctgaggtaggagaatggcttgaacccaggcggcagaggttattgtgagccgagatcgcgccactgcactccagcctgggcgagagtgaggctccagctcaaaaaaaaaagagagagagatgactgttagtcgctggttgaggttgcatccaggggctatgagtgactcagagccctagaagggtctggtggggccccccacacctgcctccctcacccctagctcctagcgccccagacatcctaggcaggtcctgggaggcaggcaataatcccattctgctgccagtttgtcctgaaggtctgagcaagagggctggctcacaaataccagtgtttgctggagaaatggtcgcacgaaggacagatggacattgagaggtgccttcagagcaggtaagaagggagaaggactctggaggccacacaccaatcagtgccctaaatggggtggctttaggctcctccccactcctaagctgagtaggacagtggagaggtgggataatggcacagaggccccccagtgtgacctagaaggaggagaggtagggctgaaccccctttccaggccttcagatgccttgacaggcccgatgtcctaacaggatgccctctgtctcccctcgggacacccctgctcttcccatccgtctccatcaaccaccccacagtgccaagctgagggaccctcccagagcagtgactggaacctgcctcgaccccaaacaactcttatctgacctccctaatacattgtactggaacaagggattctggggtaactgcattggcacacagctggccttggagatgcataacttgtggaggcctggtcacccaggcttggcattcacagtggtcagtgcaggcccttctgcaaacagcagcagaaacggactcaaagccattttggcaaaaatcataatttaggggtccatgaaactgaagaaatgaaattggctagtgtcaggtacagttggatccagggctccacacaatgttctcaggtccccccggaacccctcgccccggcctggttcccatacacccagctcaaccttcctgatgctcctggtagaactcccaggaaaggtcgctcattgggtcacgtgtccatctcaaaccaatcactaggaacctaggacaagggagctctgattggccaggccgaggtgccacatccaccactggaactaggggtggcttctccatgtggcctgagcctggggtgggcgttgctgcttgaggcagaatgcaggttgggagggtagatctgcgaatgtccaactcagcctgtagagaaggtgcagtccagccttccttatccagatgaagaaagggagaaccaaggctgggtgcggtggctcacacctataatcccagcactttgggaggctgaggcgggaggatcacgagctcaggagtttgagaccagcctagccaacatggtgaaaccccgtctctacaaaaaatacaaaaaattagctgggggtagtggtgtgcgcctgtagtcccagctacttgggaggctgagacaggaggatcacttgagcccaggaggcagaggttgcagtgagccgagatcgtgccactgcactccagcctggatgacagccagatcctgtcaaaagaaagaaagaaagaaggaaggaaggaaggaaggaaggaaggaaggaaggaaggaaggaaggaaggaagagaaaagaaaagaaaagaaaagaaaagaaaagaaaagaaaagaaaagaaaagaaaagaaaggaagaaagaaagggagacccagagagggccagcaccaggcctatgtcacacagcacatcagaggcaggcagggctgggaccaaaccaagccgggctctgctcttctctgactgtgccctttttttttttggttggggggcggcgggtgcgaagtctcgctctgtcgcgcaggctggagtgcagtggcgccatcttggctcactggaacctctgcctcctgggttcaagcgattctcatgcctcaacctcctgagtagctgggattacaggtgcccgccatcacacccggcagagcctctttttgtccatatgtatttgggggtgagacctgccttttggggctgaggatgaaatgagatgacccctgtgaagactttagcccagggccagggacttgataggtgcataatcaggattattttgatggcagttattggtccaagggtcgatggggggccagtgagagtccaggagcagcaaagccacttctggacttctgggaacatggacggctgggcctggaggctccgggcaggtgcaggaggaatgctggccacactcgttcagtcttcagtctctgcctggcccagcttcagtcaggctggggagcaggggcaagggccagggtggtctgagagacagacccaaggcatgaggcagcacctgagggatgaccccgggccagactaaggtggagcttggtggtcagaggtccgggtgggaatcctggcatttctgggcgtgggcgatgaccctgagctggctgccttacctctcggggcctcagtttcctcttctgtaaaacagggcagtgcttaaggtcctgggacaggagagggggatgacttgaccctgcgaaggtcactgatgaccccaaagaggcgcagttttgggggaaaagtgggaatgaaagcctctgaggccgggcgcagtggctcatgcctataatcccaggactttgggaggccgaggcgggcagatcacctgaggtcgggagttcgagacctgactgaccaacatgctgaaattccatctctactaaaaatacaaaaattagccgggcgaggtggcaggcacctgtagtcccacctactcgggaggctgaagcgggataatcgcttgaacctgacaggcagaggttacactgaaccgagatcgcaccaccgcactctagcctgggtgacagagtgagactccatctcaaaaaaaaaaaaaagagagaaaaaaaaagcctctgagatgcggcatgaggctggcggttccagggagaggcgaggaactctgcagggacaaacgtggatgagacacagagcaatcctgccgggcagcagcagcggaggggacagcagacgctgggaagtgaggagggcagcggggcagtgtcctcgaggcacaaagtaggagggaccagggtgtgggggatgggactggggagacagaggctgggttgggggtgtgggcagggctgcgtagggcactgggctgggctgctgacccactcaggcagcccctcctgcttcaggccccctggaaagctcccaggccacccctcagcctgtgggattcctcaccaccccacatccagagctaagcctgctatgaacaggtactcaggaagtatgcatcaactgccagaggtactcagtaaatgcttgctgcctgtggtgtccagtaagcgctcactgattgactacagtgcccactaagtgctctctgactgcacacatgaattcggctgcctctgggctctggggctacagcttgaaaggcctacagaggctctgtctccacctgcctcccctcgacctctgagagggcttccatggcacatggcaccgaggacaatcacagtgcctggccaataggcaggggctcggtaagtccccagggcccctttgacctgcctgcgtctgcccatcacagatatagaatggtgacacatcagatctttcctggcaccacactctctaagcgtggtcagccacacctcccacagctcacgctgcacttgtgcggtcctctcccatctggtcctgggcctggccacgtgactggcctcaacggatgggccacccacaaatgtgaaaccagcactctgcatgggagccgctctcctggctcccagccaccaggagaaacccgggctggcctgctggagaggccatgaggaaaatctgacccctgctgccaacagtcctggccaagggaccccctgactatgcaggtgcagctgagctcccatgagcaccacatgggtgagccccagggacagcagcagaaccacccagctgagcccagcccaaagtgcagaatcatgagtaggttaattactggggctgtaaaccactgttttgggatgctgtgttatgcagcaatagccgactgctccaaagcacatccgtcactgtgccctgcaccctcttggtcacctgagagccacctttacagaaagtaaatgcagagaccagagagggtagtgaatttgctcggtcacacagcaggtaggcagtagatgggtggggaggtcccagagataggtgggtaattgcccatgccgggctctgcctgagagactgtgcacgggtaaagcaggctgctggcacgtggtaggatagaggaaatgtgggctcccttctctgtcttggggggtggaaatctctgggactagcatggggcctatggcctggaaaagagagaggaaggtggtggagagagagtgggagagatgggctgacatggtccctgagcagcagggtggaacattctggacctgcagacacccctccacctgccacctccgaaatcatcccacaagcccagtgagaaaccccaagtggttagacaagcaggtgcctgcctggctgccaagcgggcgggttggttagttcagagcagagagagaggctcgtggctaccctcggcactgacctgggttggcggaggctggggggccccgagtctcttccaggatcaggctgaggagggcgggggtggttcctccgggctgcaacaaaacatgtgcagcatccatgaggccaaggtcagaggccacaaggcttgctcagctggctggagtgtatgtttgggtgatactctggtctcaaagacctctggcttgagcttctggggcatcctgcttaaaagtgggatgagtgggccaggaacggtggctcacgcctgtaatcccagcactttgggaggctgaggtgggtggatcacctgaggtcaggagttcaagaccagcctggccaacatggcgaaaccccgtctctactaaaaatacaaaaattagccaggtgtggtggcaggcgcctgtaatcccagctactcgagaggctgaggcacgagaatcacttggaacccagagagggaggctggagtgagctaagatcgcaccagtgcactctagcctgggcgacaaagtgaggctctgtcttgaaaaaaaaaaaaagggacaaatggctgggcccagtgggtcacacctgtaatcccagcactttgggaggctgaggcgagagaattgcttgagcccaggggtttgagaccagcccagggaatgtatcatgaccccatctctatttaaagaaatatatatgtatgtttttaaaagtgggacaaggcactccagaggccacgtctgcaactcactcacacaagactgggcacttcaaacccacagggcttacaaagagaggtgtcagcagcaactcaagctgctactaatatctttcaggagtgtgttgcgtttttgaaacagcaggcacaaacagggcatatgaaagcatttttggaaaccctgagttgacagtaagagctatggcttttcagtgaagtctagatccaactgccaatgccaacccatggcagagaagccagatgccgctcctcttcagatgcaagagagcccagataaacccttcatgctaccgtttgagggaagattgctacactcccattcttacacatacactcaagtcttgtttctgcaattttcgcgtcttagttaagcaacacagatgctttctttcttttgcccagtgggggacaggcctgccagaaccccaatctgtgggagccagacgcatcccaaggcgacattcctgctcctggcacatgagtgtgtgttcataagcgtgtttattaacttagaatgccaacaaaaacaaaaagaagggctactcttcaaaaattctctttccaatgttcaaggactgtgagtgcttttcgttttcagacccctggtcctgggcttaaagcctcccttggctctgggtcctgggacagggagaggcccctgccatctccctggccccatctcccccagctggccggctccagccacagaagccttctcggtgcttctcgaacactcccagggatcccagccccagagcgtctgccctcaccactgccccacatggaactccgtctgcccccggatcgtctctgtctgcatgtaactcatgccacctcctaggaggggccccgcagtgttcttcacagcgcatctgacatgctcttgtctgccatgtttacctggttgtcgtatgtctccttgtgagcctgtctgtctcggtcactgctatgtccccagtgcccagcccagggccaggcacacagcagagcgcaggacctcggtattaagtgactgaactcaggttatagatgccacaggacaagaggaggtcaccagacaccaggacaaaaggaaagagacagttttctaataagcgagaagcagcggttcccagcgcagctgagagacggtccttgcagctgggagtggcagtgggggcgggcggtcccaggagctacctgtggccctgggcactggcattcatatggtcccggatgctgatggcctgtttgagcagaccctccacgctgcggaagtagacgctgctgtccaccaggttcttcacggcgctgaaacgggaggacaggcctggtcagcgctccggacctgcaggtaactgtcccacaccccagcacttgaggtcaccaccagggctcggtgggtacctcagtgattctgcgggcttcccgaaggactcacagtgggcttacattttagatttccctgctatgactagatgacatctgtgcaacacagcacattctctgccactgaaacatctaatgttttgaaggagggatcagtgtataaagatgtcataaaaaatatctcggccattactgctgataatgggggtgtaaaaaataggaaagaaaaaacacctgggcactgtggttcacacctataatcccagctactcaagaggccaaggcaagaggatggcttgagcccaggaggttgagaccagcctgggcaacacagcgagaccccatctcttaaaaagaaaaatctgggatgggcgcagtggatcatgcctgtaatcccagcactctgggaggctgaggcgggtggatcatgaggtcgggaggtcaagaccatgctggctaacaaggtgaaacctctgtctctactaaaaatacaaaaaaattagccgggcgtggtggcggccgcctgtagtcccagctactcgggaggctgaggcaggagaatggcatgaacctgggaggcagagcttgcagtgggctgagatcgcgccactgcactccagcctgggcgacagagcgagactccgtctcaaaaaaaaaaaaaaaatatacatttcactacagacaaatgttcgctggcctcccgcctagcccagtggtatctggggcaacttctgtggtgatgaaaatgttctttatccattgagatggctgagaggcacctggaatgtggctagcgggacttgggagctgaatattttttttctttctttttttttttttgagacggaatttcgctcttgttgcccaggctggagtgcaatggtgtgatctcggctcactgcaacctccgcctcccaggttcaagcaattctcctgcctcagcctcccaagtagctgggattacaggtgcccaccaccacacctggctaatttttgtacttttagtacatgttggtcaggctggtctcaaactcctgacctcaggggatcctcctgcctcggcctccaaaagtgctgggattacaggcgtgagccactgcgctcagcctcattttgtaatttttttttaatttttaatttttttttttgagacaaagtctcactttgttgcccagactgagcacaatctcagctcacagcaacctccgtctcccaggttcaagcgattctcctgcctccgcctcccaagtagctgggattacaggtgcccaccaccacacctggctaatttttgtatttttagtagagatagggttgcaccatgttggccaggctggtcttaactcctgccgcaagtgatctgcccacctcggcctcccaaagtgctgggattactggcgtgagtcactgcacccagtttcattttaacgagttaaaattgaagtgtgcttagccacccatggcgtaggttcctggattagatggcacagctagaggaagcagaagaaagcataggttttttgttggtttttttttttcctttcttttttttttttttttttgagacggagtctcgctctgtcgcccaggctggagtgcaatggcgtgatctcggctcactgcaagctccacctcccgggttcatgccattctcctgcctcagcctcccacgtagctgggactacaggtgccaccacacctggctaatttttttgtatttttagtaaagacgcggtttcaccgtgttagccaggatggtctcgatctcctgagctcatgatccgcctgccttggcctcccaaagtgctgggattacaggtgtgagccaccgcgcccggtctgttttttgtttttttgagacaggatcttgttctgttgcccaggctggagtgcagtggtgcaatctccactcactgcagcctcaacctcccaggcttaagcaatcctcccacctcagcatcccgagtagctgggactagaggtgtgtgccaccaggctcggctagtttttgtattttttgtaggaatagggtttcaccaggttgcccagactggtctcaaactcctgggctgaagtgatcctcccacctcagactcccaaagcactgggagtacaggcgtaagcccctgcacccggccgtatttctttcttctttagaggagaggtctggctatatcacgcaggctgaccctgaactcctttcaaggcatcctcccacctcagcctcctgagtagctggaactataggcgtgcataaccattcccagctctagcaactcctatttcttttcttttccttgagctaaggaagatactgtctgtctggtcaacccttgtcccaccaagggggccaaggctgccaatggcagaatactgccccagcagcaggatttcttgtctaggcaccttcgcccacacaaccaaacagcaacacaccaagggaactgctgggagcatcattcagccgccaataaaatggcccacagcccatgtcaggtgcaaacagcatgtctgtgcaaagtcgaggaacttccaaggccaactgggcaacccgaggcaaccggaataaggcttgggaatacagtcacgaggaatggaaccaaagcacaggaggcaaggggtcagtaacaaaaagaaacaccggccaggcgtggtggctcgcatctgtaatctgagcactttgggaggctgaggtgggtagatcacctgaggtcagaagtttgagaccagcctggccaacatggcgaaaccccatctctgctaaaaatacaaaaattagccgggcaaggtggcgggcgcctgtagtcccagctactcgggaggctgaagcgggagaactgcttggacttgagaggcggacgttgcagtgaactgagatcatgccactgcactccagcctgggtgacagagtaagattctgtctcaaaaaaaatttaaaaataaacagccatatctgtgctttgggcttccccctggctgccatccaccccactggcccatctgtcctggctgtgggagagaaatgctggtccccagaggcatcttccagaatccctatccctctttcctgtggcagctggggaggggctcagcacagggaagagacccacctggggccctggccaagtgaatcgtggtacagaccccatacacccactcgggtaggcctggcagggtggggcttactgggcagttggctgggatgcccctgaatgcccaggaggccagagcagcaaaaggtggccctgcagcggggaggctgtggcgctcacctgcaggcgtactccacagtgtagatggctccctggctctgctcctcccaacgctgcatgtctgcctgtagggggcgcaggagatatttggcaagggaggccacccccacctagagggccttcctcccagctctcttggttggggctctcctgagtcctcatggtggaagcagagacctttcctcctgcaactcccttccctcacaggtctgggctttctgtgaacacctggccaccatgcctcagggcctttgcacaggctgttccccctgcctggcacatccttcccttagatagtcagacggctgcctccttgccatgcaggtcataactgtaacagaatagtatagtttgactgtgtccccacccaaatctcaccttgaattgtagttcccataatccccatgtgttgtgagagggaccaggtggagacaactgaatcatagaggtggttcccctcatcctgttctcctgataagtgagttctcacgagatcttgtggttttaataaggggcctcccccttcactgggcactcatacttctccttcttgctgccatgtgaggaagtacatgtttgcttccccttctgccatgattctaagtttcctgaggcctccccagccctgttgaactgtgagtcaattaaacctctttataaattacccagtcttggctatgtcctgatagcagcatgagaatgaactaatacacacatcttgccatctccttcaaaatctatcccagatctgtccaccacgcctctgacctggctttgccaccacatgcctccttgctggtgtcccagccttgactcctgccctgacagcccctgctcctcccagcaggccccagctcaccttgtgctgggccagctcggggagggagcgacgcacatgctcctgcagccggtacagggccacggatggctcgttggccaggacgtagacgctctcagtgaacttgtccgtgactagatacaggtggtagggatggggcgggtgtggggagacaaagcgtcagcctcctcattgctcaagtgttgagcccagccagagcaaagggggcatctggcgtgtccctccgcagctaggtcactcctggcccatgacaggctggaggaagtggtcacagcagggctcactcaagaggacattaatgagaccgggtgcggtggctcacgcctgtaatcctagcactttggaggctgaggtgggcagatcacctgaggtcaggaattcaagaccagccaggccatcatggtaaaacccatctctactaaaaatacaaaaattagccaggcatgatggcgggcgcctgtagtcccagctattctggaggctgaggcaggagaaatcacttgaatctgggaggtggaggttgcagtgagctgacgtcatgccattgcactccagcctgggcaacaagagcaaaactccatctcaaaaaaaaaaaaagaggacattaatgagaggacataatgagtgatgagttcataacgagtaaacttcttttttttttttttgagacagagtcttgctctgtcatcaggctggagtgcagtggtgcaatctcggctcaccacaacctccgactccctggttcaagtgattctcctgcctcagcctcctgagtagctgggattacaggcatgcaccaccacgcccagctaatttttgtatttttagtggagacagggtttcaccatgttggtcaggatggtctcgatctcctgacctcgtgatccgctcaccatggcctcccaaagtgctgggattacaggcttgagccaccgcgcctggccagcttgattgaactttttttttagagacagggtctcgctctgttgcccaggctggagtgcagtggtgtgatcacagctcactgcaccctcgaaactcccagcctcaaggcatcatcacgcctcagcctcccgaggagctagaactacaggtgcaaaccaccatgcctggctagttttttcatttatttatttatttatttattattattttgagatggagtctcactctgtcgcccaggctggagtgtagtggggcaatcttggctcactgcaagctccacctcctgggttcacgtcattctcccggctcagcctcccgcgtagctgggactacaggcacccgccaccacgcccggctaactttttgtattttttagtagagacggggtttcactgtgttaccaggatggtctcgatctcctgacctcgtgatccgcctgcctcgggctccaaagtgctgggattacaggcatgagccaccgcgcccggctcattttttaaaatagagacaaggtcttgctatgtggcccaggctggtcctgaactcttggtctcaagtgatcctcctgcctcagcctcccaaagtgctgggattataggcatgagccactgtgcctggcccccagtgaactcttctcatctttccctcccaaacccaccggtagtggacactgctgcctactgcacttcccggcattctttttgcccccgtgaccacactcgggactcttcagagcatgcccacaggacctgaaagtgcctggaagttcacatcccaggagggcctcagctgccactcaccagtgagagatatggaaacctgtgtccctcgctgggcactgaacaacccagagcctaacatccccctgggctcctgtgcaggcccaggatgaggcctccctctgcagattttacctgaggtgcccctcgctcagcctcctcaccagccagccctgccctgtttccccttctcccctgcaggtgtctcctgatgaaattttttttttcttgtttttgagacagagtcttgctctgttgtccaggctggagtgcagtagtgtaatctcggctcactgcaacctccacctcccgggttcaggtgattctcctgcctcagcctcccgagtagctgggattacaggcacccgccaccacgcctggctaatttttgtatttttatttgagatggggttttaccatgttggccaggctggtctcgaactcctgacctcaagtgatctgcccacttcggcctcccagagtgctgggattacaggagtgagccaccgcccggccctgataaattaattgcacgcaaatcctcattacagggtctgtttcaacaacggcattcccagccagccagcagggcccgcctttcctgtcccattcttgggcagatcctgatggttccagtctcacctgttctattataccacactgcccgcaccggtccaggcacagcgaggcacggccatctcctgcctggatgccagatccaccttctccctggcctctctgcttcccctgctgccaacagttcaacctccatgcagcacgtgaggcaaactccaaatgaacaaatcatctattcccacccttgctttaaactcttccatagctcccacctgccagagaataaaatccgcctttcttgccctgcatgttctggctgctcttgacctccctgccttccttgccctccacccctggctcttccttggacctcccagcactgcccagaactttctcactgcccgagaggacaaggtaggaggatcacttgaggataagaatttgagaccaacgccgggtgcggtggctcacgcctgtaatcccagcactttggcaggaggatggattcagcctaggagttcaagaccagcctgggagacatggcgaaaccccacctctataaaaaattgcaaaaataagctggtcatggtgatctatacctgtagtcccagctactcaggaggctgaggtgggaggactgcttgggtctgacaagtggaggctgcagtgagccatgatcataccactgcactccagtctgggcaaaagagtgagactctgtcccaaaaaaaaaaaaattaaatgcccgtatgtgaccagttgctcctttattcattacagcagagctctaaacacttggtcacctcaaggcctttgcacttggtattcccacctggagacaccattccgtcactggctctccttcatccctcaggtctgctcaaatgtcacctcctgggcaagaccctccctgactaccaagcttaaaagatgacccctccacctcacggaggaccttggcaggcattttgttcctttctcttaataccaatttcaactgattaggttacatgttcacaggaaaagttaaaagcttggacttgggagagcagagcttctctgagcctcagcttcctcatccacaaaaaaagaataacagcaccagcctcaaagtttgctacagagatgaatccaatgccatcaccagggtgactgctcaggagagagaacccaggcgtgtctgggagtcaaaggaggctaacacaagtctctccatctcaccactgtgccttgagtggcagagcccagcctgccacctccaaactgtgtgacctcttaccagataggcctcctcgctttgaatgtgagcataacggccaggggcggtggcccacgcctgtaattccagaactttgggaggccgaagcgggaggatcacctgaggttgggagttcgacaccagcctgaccaacgtggagaaaccccgtttctactgaaaatacaaaattagccaggcatggtggtgcatgcctgtaatcccagctattcgggaggctgaggcaggagaaacacttgaacccgggaggcggaggttgccgtgagccatgatcacgccattgcactccagccttggcaacaagagcaaaactccgtctcaaataaaaaaaaagaagaagaaaggtgagcataacagacaaggcacggtggctcatgcctcatactcatgccctccgttatccatggttcccgaatctgtggattcaaccaaccgtggatggaaaataggaaaaaaaaaattccacaaagtttcaaaaagcaaaacttcaatctgccctacacgaagcacttctttgaatccatgtgaatgaagtgatgtgtaggcctgtattatgtattctagatgtgagtaatctagggtgatttaaagtataggggattagctgggtgcagtggttcacacctgtaatcccagcactttgggaggccaaggtgggtggatcactcgaggtcaggagttcgagactagcctgagcaacaaggtgaaaccccgtctctactaaaaatacaaaaaaattagctgggcatgggggtgtgtgcctgtaatcctagctactcagggggctgaggttgcagtgagctgagatccccccacggcactccagcctgggtgacagagcgagactccgtcaaaaaaaaaaaaaattaaagaattagcctgatgtggtggtgtgcacttgtagtcccagctactggagaagctgaggcaagaggatcgcccgcgccagagagatcgaggctacagtgagccatgatcgcgccaccgcaccccagcctgggcgacagtgtgataccttgtctcaaaaaaaaaaaaaaaaaaggaaacaagacgcacagcgattactacgccccggggattcttccaatgcattacaaatatcaggttgttgagttttttttttttagacagggtctcacttgtcacccaggctgggggtgcagtggcacgaccgtagcccactgcagtgcagccttgacctcccgggctcaagcaatcctcccaccttagccgcccaagtagctgggaccacaggcgtgcgccaccacgcccggctaatttttgtatttttttagagacgagatctcactatgtcacctaggctggtctcgggctcaagcgatcctcccgcctaggcctcccaaagtgctgggattacaaagccaccactcccagcctcagctactgaattcttgaaacaatcctggggggaccggtaattaaagcagacacggagcctttctacaggtttcaaaactagtcagcggcagagctgggattggacggcagttcaatcactgctcctcgcacggtccctccgcgcccggcctttgtcaggccgcccctccacaagttaccggccccctctgtcccgcccgcaggcccgcaccacctttcttccccttgagctgcatctccggctcctccatagcgaccgcggccgagcgaaccgggaaacggcaccggaagcccggaggttgggacgcccgcctaagccttccctgctgaaaccggacgccgcacggctcctgttccggtgtcagagggcccgccctccccgctcctcagtctttgcggacaagaaaggggctgtgtgagacgcagggaaggaggcacacccgggggtggcgcagtgaggagggggcgcgacggccaggaggctggtggagcgacacccaggcaggagagggggaagaactctctccctttctgaacccccttttccttgagagacgagttgggggagtcctccacgcattacccactcgggccgcaaaaactcccttctttagccctctgcccccgcccttgcttataagcctttgagaccgcagaagggaccttgttgtggaacgggacggccaaggtacgctgcccctttaagttccagacgccccgcgtacttcccctacttcttcttcttgagatagccccgcccatctacccgaagccggagccaattggctccctctggaaaaatctgtgggcagggtaaaggtgagcgggcgcaggcgtagtgaaattctcagagccctttaggccccgcccattccctccgagtcggtgaggaggggaaaagaaggcgcaggcgcaactgccctcccaggaccccagcggaacccacgccctcccctaagtcttaaagggccagaggcagcacttactgcccgggcccttcctcacttttggggggcgggggtgcgcaagcgcagtgggggagctctggggtgggggtagcggtcgagtatcaagttgctttctgtcccggcagaggaagccagatcgctgagggtccggtctccagtttgcctcctgctatatccattggaagagaaaagtttgtgacttgggcccccaagttttgagagaactgggctttcggcgcggggggacagaggaggctcgtggggaggtgagtggacctcctggatcgatttaggaggctcgggtgggactgggaccaatcgcacctttgttgagccgtcactcattatggggagcccctcccaacaaccatagcgaatatttattgagctccacgcttagcagatcccccgataagctatgtacagacataattcgttgtaggtctcatttccacattttgtcgtggaggaaactgaggctcaaaggttaagtcacgtgcccaagttctcacggcctataaattgagggattcgaacccagacagctgaccccagagccccggcttttttttcctttcttttttttttttttttttttttttgagacagagtcttgctctgtcgccccagctacagtgcagtggtgcgatctctgctcaccgcaacctccacctcccgagttcaagcaattctgcctcagcctcccgagtagctgggatcacaggcgcccgccaccgcgcttggctaatttttgtatttttagtacagatggggtttcaccatggtggccagcctggtctcgaactcctgacctcatgatccaccctcctcggcctcccaaagtgctgggattacagccgtgagccactgtgccctgccagagcccaggctcttaaacattgcacattgtaggtgctttggtggtggggaatggtagacctcgaaagcagttggactctggttttcatttccctggctctggtaattaacctggacctcagtttacccaccctcacagtgcaaggctaggtatgcagtcggtgcctactttattataactgttgataattattgtcatctctccccttctgacacctccgccagctttccccatggagcttacccagcctgcagaagacctcatccagacccagcagacccctgcctcagaacttggggaccctgaagaccccggagaggaggctgcagatggctcagacactgtggtcctcagtctctttccctgcacccctgagcctgtgaatcctgaaccggatgccagtgtttcctctccacagggtaggatacctcctctgggattagccctctgggattccatgatgatggaatgtcaggcctcacatggaacctgtgtcttgctttcgtttttgttttgttttgttttgttgttttttgagatggagttttgctcttgttgcccatgctggagtgcaatggcgtgatctcagctcactgcaacctctgcctcctgggttcaactgattctcctgtctcagcctcctgagtagctgggattacaggcttccgccactacgcccagctaattttttgggtatttttagtagagacggggtttcaccatgttggccaggctggtcttgaactcctgacctcaggtgatccgcccacctcggcctcccaaagtgctgggattacaggcatgagccactgtgcccggcctgtttttgttttttgatacagggtctcgctctgttactaaggctggagtgcagtgatgcaatcatagttcactgcagcctcaacttcctgggctgaagccatcactcagcctccctaggagctgggactataggcatgcaaccacacctggctaattttttttttttttttgggaggctggtctccacctcctgggctcaagtgatctgcaggcctccacttccgaaagtgctgggattacaggtgtgagccacagtgcccggcccttcacacctgtttttaactctttgagggtagatagctaggagtgaaattactgggtcagatggtcatcctgttttacttactgaggaactgaggatttatttttgattggagtccaagaatatgcctaatttagttccctcccacgacctttgttgctgccactcctgtctggaatgctcttcctacacttcttcctatagctgactcccctcccctccctcccttcccgcctccgttttttttttctttctttctttctttttttgagatggagtctcgctctgtcgcccaggctggagtgcatggagtgcagtggcgcaatcttggctcactgcaagctccacctcccgtgttcacgccattctcctgcttcagcctcccgagtagctgggactacagtccgtttttttttttttttttaaatggaggtttgcttttgttgcccaggctccctcccctcccctcgcctcccctcccctcctttcccctctccccactctcgagacgcctcctggatcccctctcttcttgagacagaatcttgctctgttgtccagggtggagtgcagtggcactatcttgactcactgcaactccctctcctgggttaaggtgattctcctgcctcagcctcccaagtagctggcatgcaccaccacatccagctaatttttgtgtttttagtagagatggagttttgccatgttgcccaggctggtctcgaactcctgacctcaggtgattgcccgcctcggcctcccaaagtgctgggattacaggcgtgagccaccgcgcccagtccctgtagcggatttctttgacttcctaagatctcggtggtgtcaccttggggaggccctcctgttaccaccttgtctaagaaggacttattccttgtgctccgttcttttcatcctcttctacctgcttttaaatttttttttttttttttttttttgagatggagtctcactcttgttgcccaggctggagtgcagtggcgtgatctctctcactgcaacctccacctcctggattcaagcgattctcctgcctcagcctcccgagtagctgggattacaggcatctgccaccatgcatggctaattttgtgtttttagtagaggtggaatttcaccatgttagtcaggctggtctcaaactcctgacctcaggtgatccacccacctcagcctcccaaagtgctgggattacaggcatgagccactgtgcccggccttaagttcttttgaacacttatttcaacttgaagttttttattatttctctatgtctgatgcacctacttgacccccgactccctagagggcaaaaactatgtcttgtttgctcagaacattgccaggcagggaggagaaagatgcaccctgggtattcaagagagtagagtgagtgaatggtggagtcccaggcactgcctttggtagctccaagaccccagggagataccgaaggcagtagcatggtagctcatgcctgtaatcccagcactttgggaggccacggcaggagaattgcttgagcccaggagtttgagaccagcctgggcgacagagcaagactccatctctaccaatatatatatatttttaatttgctgggtatggtggcacctgtagtttcagctgctcaggaggctgaggtgggaggttggcttgagcccaggaggttgaggctgaagtgaactgtgatcacaccaccgcactccagcctggacaacagagcaagactctgtctcaaaaaaaaaaaaaaccccaatagctgggtgtggtggctcatgcctataatcccagcactttgggaggctgaggcaggtggatgatttgaggtcaggagtttgaaattagcctggccaacatagcgaaaccccgtctctacttaaaatacaaaaattagccaggtgtggtggtgggcgcctatgatcccagctactcgggaggctgaggcacaagaatcgcttgaacccaggaggcagaggttgcagtgagccgagatcacgccactgtactccagcctgggggacagacggagactccatctcaaacaacaacagcaacaaaaaaaaacagatgggcttctgtcctgaagcctcagagacatctactgaggggaaactgacgcctgttgtctgtttcccagcaggcagctccctgaagcactccaccactctcaccaaccggcagcgagggaacgaggtgtcagctctgccggccaccctagactgtgagtgggcccacggtccccaacaaggagaggagtaggagggtgggagggcctgtgaggagcaatcgtggacagagggtaaactgaggcacagagaagcaaggggatgagtgaggactctgcctctgtcctgccccagccctgtccatccaccagctcgcagcacagggggagctggaccagctgaaggagcatttgcggaaaggtgcgtgtccacacacatgtgctggcatgtctgcacctggctggtgtgtgcatatgggtgtccatacccactcatgacgtgacctgtgagtgtccacgtgtatgattgtatctaactgtgtgtgtgaccgtgttcatgtatgtccatcaacatacgctccccctcattcccctgtctaaccccagccccccacctcgtccccatttggcagcactggggatagggggcaggggtgcagcctggtggtattgcccgcctcctcctgccaggtgacaacctcgtcaacaagccagacgagcgcggcttcacccccctcatctgggcctccgcctttggagagattgagaccgttcgcttcctgctggagtgggtgcgtcccagcccagctgggcagctggggggttcccgggggccttagggtgggctggggttttggctgtgtctgctggcgccttgtctttgagatgcggctgctggctgggtgcagtggctcatgcctgtaatcccagcactttgggaggccgaggcgggtggatcacttgaggtcaggagttcaagaccagcccggccaacatgggtgaaaccctgtctctactaaaaaaatacaaaaattagccaggcgtcgtggtgggtgcctgtaatcccaggtactctggaggctgaggtgggagaactgtgtgaacctgggaggcggaggtagcagtgagccgagattgcgccactgcactccagcctgggcaacagagcaagactctatctccaaaaaaaaaaaaaaagatgcggctgctgtgggtaccccaggattcctggttatgccccaatccatcctaccactgtcccttcttctccctgcagggtgccgacccccacatcctggcaaaagagcgagagagcgccctgtcgctggccagcacaggcggctacacagacattgtggggctgctgctggagcgtgacgtggacatcaacatctatgattgggtgagggactgcccatccccaggacctctcagcctcctggccttcattcctgcctcaaatgttcacagagtacttgaaaggtgcaggcctgctctaggtgccgagaacacgagacagccccattcccagcctcacagagcagagctccccatgcagggaaggcagacatggaaacaggcagctgagatgcagtgaactgcgctgcgatggcagatgcacaggtggctacaagagccccatgtgggcaagggaaatcagagaggtcttcctggaggaaggtgtctaagcttgagaccccagaaagtgagatgggcccagtgatgagcaggaggaaccacgttcaactggaggccagagagtacaaggcattttgagaatgaggaagaggtaaacctttggtttctcctgcccctacccacgacagaatggagggacgccactgctgtacgctgtgcgcgggaaccacgtgaaatgcgttgaggccttgctgggtgagtgggagtcgggagtggccctgggggccccagcactccagcgggccctgcgggaatcctgagggcagggagacgcccaagtgttgcttgaagagttcttggagcaggtagtccctgcctgctcttctcggaggatggatcagaggggaggaggtggtaggaccacacgggagtcggggtctgggtttaggatctggccaagaggctaagcacctccatcctccatggttcagagacccttcagccacgttcttcagtggagaccaagatagcagaggttggacccttgtcaaaggccacatgggcaacgggcagacccacggctgcattgtggggaatgaggggtgccatgggatctcccaggtccccagaccccattctggactcccaggccccaccctccagcgccctcccctctcctttgcagcccgaggcgctgacctcaccaccgaagccgactctggctacaccccgatggaccttgccgtggccctgggataccggaaaggtcagcctgagacacacagagcaggggtggggtcccttccataggcagggtgaccataaaggggtacatgggacaccccttcagtggtcatacgccggcagcgagagtgtgttgacaggtgttgagcactgctgtgtatcccgcctgggaacatcccagtcctggctcctggggctccacatgtgctggggtagggaggacaatgggtgtcagtggctgtggccatgatgggggacacataggcatgagaggccgaaagaggggcctctcatcaaagagccccaaagtggccaacagaagtcagagaggcttcctggaggaaggtgtcttaaggttgagaccccgagaagtgaggtgggcccagccctgggatggggaggtcagggaaggattctgggggacctgaagggagggagaatggcatccaggtgggaggagtggcccctgcggaggcctggcagtgaggacaccaaggggtaggcgaccaggccatagtgcacagagccacagaggccatccctctccgtggcgggcagtgggtttgaacaggggccataggcagaccccagtttgactccattttctctgtcacaatgggaccccaacttccccatccataaaatggggagatcccaattgaaccgaccccctggggtcatggtagagatggggtgcttaggaaatatccccctccttccttcagagttttactgtgtttgggacagaaatcattcctcttccctcctcatgttttcggggggtttgtttttttgttcgaggcagaaagtcttgctctatcacccaggctggaatgaagtggtgcaggcacagcttactgcagcctcgatctcccaggctcaagtgatcctcccaccacagcctcccgagtagctgggaccacaggcattcgtcaccatgcctggctaattttttgttgttgctttttttttttttttttttggacatggagtctcgcgctgtcacccaggctggagtgcaatggcgccatctcggctcactgcaacttccacctcccaggttcaagcgattctcctgcctcagcctcctgagtagctgggaccacaggtgcacaccatgacgcccggctaatttttatatttttagtagagacggggtttcaccatgttggtcaggctggtcttgaactcctgaccttgtgatccgcctgtgttggcctcccaaagtgctgggattacaggtgtgagccaccacgcctggctgtgttgttgtttttttagaagagacagggtctcgctatgttgcccaggctggtctcaaactcctgggctcaagtgatccttcttccccagcctcctgagtagctgggactacaggcatgtaccactctacccagctaatttttaaaatcttttttatttattttttgagacagagtctcgctctgtcacccaggctggagtgcagtggcacaatctcggctcactgcaacctctgcctcccaggcaaacaattctcctgcctcagcctcctgaatagctgggattacaagtgcctgccaccacacctggctaatttttttttttttttttttttttttttgagatggagtttcgctcttgttgcccaggctggagtgctatggcgtgatctcggctcactgcaacttccgcctcccaggttcaagcaattctcctgcctcagcctcccaagtagctgggattacaggcatgcaccaccatgcccaactaattttttgcatttttagtagagtcagggtttctccatgttggtcaggtgatctcaaactcccgacctcaggtgatccacccgcctcagcttcccaaagtgctgggattacaggcatgagccaccacacccggctgcacctggctaatttttgtagttttagtagagatggggtttcatcatgttggtcaggctggcctttcctgacttcaagtgatccacctaccttggcctcccaaagtgctaggattacaggtgtgagccaccaagcccagcctaatttttaaatttttttggtagagacagcgttttgctctgttgcccaagctggcctcaaattcctgagctcaagcagtcctccccactggacctcccaaagtgctgggattataggtgtgagccaccatgcccaggctcatcttttcatgaaagtcacaattcacacattttgcttggtaggaaatatttttatattaattctgaaaagctacaaaagtgcatttttacaaacttaggggaagttgaggttcctggggtgagtcctcggttctcccagctttgctctgtaatgcaggtctctgcaagggtccctgtttgtcccctaaggggagagcgcaggttggcctgtgcctccaccccactcccgattcaagctcacagcccaccttttccctgccccatctcagtgcaacaggtgatcgagaaccacatcctcaagctcttccagagcaacctggtgcccgctgaccctgagtgaaggccgcctgccggggactcagacactcagggaacaaaatggtcagccagagctggggaaacccagaactgacttcaaaggcagcttctggacaggtggtgggaggggacccttcccaagaggaaccaataaaccttctgtgcagaatgagggactttgctgtgcttcccggagggcttcctggaggagacagcccctagaggtctcacaccttctccccaagcacccgcaggtggtagatgaccacacggccaaaaaagtcagtggcatcctcaaacgtcaccttcagccggtccacttcagcagctggtatggggaaagtgtgagcgtgggcagtcaagggaaactggtgatttctggtttcccacccgcaggcccccaccccttccagacccagctcacactccaccgatgtgggcaacctggggaagctgcaggtccctctaagcctctcacacagaacaggtggtcatcagcaccattttacagaaaaagtggagtcctagaggtcacgtgttcaagatcacacatcagggttcccattcgggtttgggtgagtccaaagcttccagaggcacagaccacccaccccagaagcaggggcaggatatctgaagcgagttgttgtcctcagggtagaaatctacaatcttgtggagagcctgagtgccctgtgaaccttcagcagagaaaggcaatgagtgtctggggtgacccctggaacccctgccacccagggccttctagtaccttccaggcagccccggcgactggagaagccaccctgaaactggatctgcagctgggagacacggatgagctggggaaactccagcgtcacccactgggaggggccctggaagcagacagggaaactgaggcgcaagctcactgcaggcacagagccctgctatgcctgtctcattcacatagttcttggaatggaggggaagaaggaaattcggcacatgttcctttcctggccacccatgagggccccctgacgttctcaaggcatgagatctgaatctgaatcaccctagagatggagggtcgagggaggcgcctcacctggtctgagttccaacatgtctcctcatcctggtcgaaaagatgtttttttccaaactgccgagtgttgcgattcagcactgaactcaccctggaggcaccaggatcaaggcgaagagaggggctgagaccagctctcagctccgcggagggcctgacccccagatctgtccactgagggctcgaccccaggcttagggcctcgccactgcctgtccccacagactcttacctgctcactgtctctggacaaaccaaagagtgggtcatgtcggttccacaagacctcgcagggcttaggattgggcacagccttggttcgaatcccggcgcctcctcaagctacagggcggcgcgatcttggctacgccttggcctgaacgtcctcacctgtaacttgggacgagaaccgccactccctcgcccaccccagtcctaaatgtcgcctcgatcaatcccctgccggaaaatttgggagagaggatcagggaaaccgccaatgcccggaggccaggcctttcacaggaaacagatttcccgcgggtttcgggggcggtggctttttgtgcgaggctgtttctctgcgaatagctcttggagccaaatcttgggacccggaaccgcgtgggcttggcgcatgcgtgttgtaattcaggcgccgaccgcggacgctccagaggtggggtttggttcgaccccgccccttcatgctcgcttcttaaagggcccgggttcgatgattgaatttaccttggttcccttgaagctgtagggaaaaggctggctgcgcgcacggggcgctgtccctcggcgcccgaaggtgtagagcactgattttgactgattttggaatccgaaagacttcctttttttttttttttttttgaggcggagtctcactgtcgcccaggctggagtgcagtggcacgatctccgctcactgcaagctccgccccctgggttcacgccgttctcctgcctcagcctcccaagtagctgggaatacaggcgcccgccaccacgcccggctaatttttcgtatatttagtagagacggggtttcaccgtgttagccagaatggtcttgatctcctgacctcgtgatccagccgccggggcttccaaagtgctgggattacaggcttgagccaccgcgcccggcctttttttttttttttttttgaagtggggtctcactgtcacccaggctggagtacaatggtgggatcgcggctctctgcgacctctgcctcccaggctccagcaatcctcctacccagcttcccgaatagttggaactagtaggcgcgcgccaccacggcaggctattttgtttgtttgtttgtttgtttgttttttggtagagatgaggtttcgccatgttgcccagattggtctcgaactcctgggctcaagtgatccgcccacctcagcctcccaaagtgctgggattacaggcgtaagccaccgcgcccggccagagagacttcctatgacaatgtctttcttcctactctaacctactctaccctaacggctaccctaacctactctaacctactctaccctaaccactaaatgcagcctgggaatccccgaacttcactgcctcccggaggccaaaggcagagttgtggaaaaggccacgatgttgggagtatctgaagtcctcatcaaccctttttgttcttgttgggacagaggagccctggcctccaagtttgtctttcccagaaaatgctgctgggacgtcaaggaaggcttcttggaggagggagcatgcgaggtcgggtgttttttgttgtttctgttttgttttgtttcgagacggagcctcactttgttgcccaggctggagtgcagtggtgtgatctcagctcactgcaacctccgcctcccaggttcaagtgattcccctgcctcagcctcctgagtagctgtgactacaggtgcgcaccactatgcctggctaatttttgtatttttagtagagatggggtttcgctatcttggccaggctggtctcgaactcctaacctcgtgatctgcccgccttggcctcccaaagtgctgggattacaggtgtgagccaccgcacccaggctgtgaggtgggttttgaagcatgaacaggagtttgccaaacaaagcctcagataccaagctgaagatttggttcactgattcactagacacctcctgcaagctctactgtcacactgtcatgtccagccttctgctggatgatgctggggacagcaagaggcctcagctccaggcctgtcccagaggagcccctgatctgggcaagacagaggtagacatagacactcctagccccaagggagagatggggccggaggagcaggggctctacctggaggaagggcttcctgggaaaggggatgttagaactgcaccttaatagggggtcaggcgccaggaattcacaagggtgagaaaatctggagtggggagggtgtcccaggcagggagcttagcataagccaaggcctagttgggtgaaagaccatgaatttgaataaaatatgtggagccacatcctgctgggcccggagcagtcatggaaggtgttggagaaagggcaggacaccatccgttctgcatgaatggagggttccaagacagagcagccactggcaagaggctgttgttcctggctttagctgaatggtctggcagccagcccctttcttcaagggctggaggaatggtccttccggcatcctactagtgtctgctcaaacccaccccaggcagcaggggtgggggctggcggggaaactgggtcaccagcagaaggcctgtctcttcagcccctgcctgccagggctttccgcatttagacagagtctggtgccatccaaacccaacttcgctggtctcagggctggggctggaggtgacaggaaactgtgcccccaacctcacccccggaaggaagttagaaagagcaaggacactggagagcccagatctggttcaaatcctggctggaccactcattggctgtgtgaccttagaaaagcaccttgacctctctgagcctcagtttctcatctgtgaaatggggggaattctattaacggcactgttggaggactctctgggttcttcaggttgacacatagtaacagtagctgactttcactgagagtccaccgtgtgtctgacttgaagccatgttctgtcgccacccattggctcgttaaacctgctgtggctggtccctgtcattcccattttatagctgaggacacatcaacttagccaagtccccccagtgaggatatgcatggctccagggctctccacaccactcctggctttggcatgcggcctccttgcccacgggtatgaggccagctccataccctcttcccgcctcctcaccccactggcgcctgggcatgaaagagcctcctgtttctccagggaattagcagctctgggctcccagcagggcagccaaaagtggtccattcattcgcttgagtgaggaaagactaagagctcccacccccaccccagggaatggggcagggagggctctagaaggtccaaaagcagctcctctggttcacttggggaaactgaggcacagaaaagcaaagtcatttggccaagatcaccaaggggaactgggatgcaaaccccagtctcactctggagttcccctaactgggcttgggttagcatttttctggggagaaattggaggtttagagagagtcagggacttgctggcagtcacacagcaagtttgggtcagtggggactctctgccttggtggtgtctggggaggcagccccacccatgcagaaaacaggtccttctgtccatgatttcattatcctggaacaaggcagggaatggccctcagatagcttcaagcctcagtttccccactgggagatggatgtaaccttttccctaaggtcttagcctggggcatctgcaagggagggtttgatgggattccctgagcctggagacccccatccggcaggtctgggtctgatttatctaccggagcccatcaggacccctctccgaggagacagatgttcacacagtagcagctggggttatgagtcctggtgcagtgcaagcctgggtcccactggaggtgacagtgggagtgggaggggtgtctgggtgtgaaaggattcaggtgggtgtgtatgggagcaccaggagctgcgtgtgtgtggctgttgtaacagtggctgggagggctacagatctcggggttggtggcattggtggtgttggtgtgaacatggttgtgtgctcactacctgtgggtgtgtctgtgactagaaacctggttgggtgtgagcaatgtggggccaacgtaggctctttgctgctggcaggaaggcgaaggtgttgtgggtgtgagcagcagtgggtgtgtttgcatgtggagggacactggtgcagcccagctcatagctttgccttcggttgtggagcaagtgtgacttgtgtgtggcccaggccaggtatggttgtgtgtggcctgaccaggttgattgtgtatgtgattgtgtgtggcccattgtggctgtgcatggctgggtgtggttgtgcatggctgggtgtggttgtgtacggctgggtgtagttgtgcatggctggatgtcgttgtacatggctgagtgtggttgtgtatggctgggtgtggttgtgcatggctgggtgtggttgtacatggctgagtgtggttgtgtatggctgggtgtggttgtgcacgaccaagtgtgattgtgtgtggctgagtgtgattgtatatggccaggtttgcctgtgcatggttggtgaaacctgtgtgtggcccggtgtggttgtgcatgactgggtgtggttgtgtatggctgagtgtggttgtatatggctgggtgtggttgtgtatggctgagtgtggttttatatggctgggtgtggttgtgtatggctggatgtggttgtcattggctgggtgtggttgtgcatggctgggtgtagttgtgcatggctgggtgtggcgtgtatggctgggtgtggttgtgcatggctgggtgtggttgtgtatggctgggtgtggtgtgtatggctgggtgtggttgtacatgaccaggtatgattgtgtatggctgggtgtcattgtgtatggtcaggtttggtcatgtgtggtgggtgagacctgtgtgtggccaggtgaggttgcatgtgagccacctgtgctgttagtgtggctggggtgtggctggggtgtgactgtgtgtgtcagtggttgttggtggcattgtgtgtgacttacccatgtgtcaccttgggcatgttcagaggcactttggaggcactgtccacccctgagacccagctctcttggagggtccagcctccctccccacctctgctctggtctgccagtaccatcccccacccctcccccactggcagcagcccctggcccagggccccagtggggtggtggggacagagaaggcactcagggctggggaggggtgcccaatcccagctcaggcctataaatagctctttgagcccagtagattcccaggcaaggttgcctcattcaagcccccggcaacagcccgcccctgggccccaggccagcccctctaagctcagccctggcaccagcgaggagccggggggtgggggcaaggggtggggaggagtggagaagcgggggaagcagaaggatgaggataggtggggttggggctcagctctgcgcccacagaccttggcttccacctggtctctactcactctgtacatcctcgggcaggtgatcctagctccttaagcctcagtttccccagcacctgtaaaataaacagcagtccctgcctgtgtgtttacttcccatttcattctccaagcaaccggtaacgtagggacattcattatcccccattttatttatttatttatttaattttttcccaagatggaatctcactcagtcacccaggctggaatgcagtggtgccatcttggctcactgcaacctccacctcctgggttcaagcgattgtcctacctcagcctcctgagtagctgggattacaggtgtgcaccaccccacccagctaattttgaattttagtagagacgggatttcaccatgttggccaggctggtctcaaattctgacctcatgatccatctgccttggcctcccaaagtgctgagattacagccttgagccaccgcgcccaccctccccccattttattttattcatttttgaaatagggtctcactgtgtcacccagaccagagtacagtgatgcaatcttgactcactgcagctttaatctcctgggctccagcgatccttccccctcagcctcccgagtagccgggaccacagatgtgtgccaccatgtcctgctaacttttaagttattttttgtagagatgggggtctcactgtgttgctcaggctggtcttgaactcctgggctcaagtgatcctcctgcctctgactcccaaagtgctgggattacaggcatgagccaccggcacctggactatccccatttcagatggggaaactgagacacagaaagatgagatggctcactcagagtcacattgttacgaatggcagggagggggtttgaaccccagacttgtggaggctgagctactcggttctcacgcacgtcacgcagctgttctcagcgtctttcccagtgtgagccacagccaaccccccagcacgctccagcctcaccgactagtcattgcatgctgtttgggtgctgctgacacagctgtcacctgcagacactcacatcagctgggatccttgacctccatctctcctctgtgacacagagtcaaacagtcagtgcagcttcccgctgtatcatcttggaccccagggctaccccttgctcacctggggtccccccttatccctcattcattcctaccctttctttgataatctttttttttttttttgagatggaatcttgctctgacacccaggctggagtgcagtggcacagtctcggttcactgcacgctccgcctcccaggttcaagtgattctcctgcctcagcctcctgagtatctgggattataggtgaacaccaccatgcctggctaatttttgtatttttagtacagacagggtttcaccatgttggctgggctgggctggtctcaaactcctgaccttaggtgatctgcctgcttcagcctcccaaagtgttgggattacaggcatgagccacggtgcttggcctcctttcttcttcttttttctttttttgatggagtctcactctgttgcccaggctggaatgcagtggcccaatttcggctcactgcaacttgcgcctccagggttcaagcgattctcctgcctcagcctcccgagtagctgggattacaggcgtccgccaccacaccctaattttgatttattagagatggggtttcaccatgttggctaggctggtctcgaactcctgacctcaaatgatctgtcctcttggcctcccaaagcgctgggattatgggcgtgagccacggcacctggccaaggcctcctttctttgataaccttgtggaagctatcttgtccctcatttgcctatcctcctaccagatggacacgcaccctcagagatgctaaacacacactcacagatataggacccagggtggagcgctgcgagcccattctcagcacagaaacaccacgaccataggaaggaaggcaggggcaaagcctgccctctctgggcacatttccctcctcatggcttttttttttttttttttttttttgagacggagtctcactctgtcactcaggctggagtgcaatggcatggtctcagctcactgcaacctctgcctcctgggttcaagcgattctcctgcctcagcctcctgagcagctgggattacaggtgtctgccaacacgcctggctaatttttgtatttttaatagggaaagggtttcaccatgttggccaggctggtcttaaactcctgacctcaggtgatccacccgccttggcctcccaaagtgctgggattacaggtgtgagccaccgaacccagccctcattaccatatttttaatggtggtcaaatacagataacataaaactcaccatcttaaaatgtgtaattcaaggccatgcgcggtggctcatgcctgtaatcccagcattttgggatgctgaggcgggcggatcatttgaggccaggagatcgagaccagcctagctgacatggtgaaaccacatctctactaaaaatacaaaaattaactgggtgtggtggcaggtgcctgtaatcccagctattcaggaggctgaggcaggagaatcgcttgaacctgggaggtggaggttgcagtgagccaacatcgtgccactgtactccagcctggatgacggagcaagactccgtctgaaaaaaaaaaaaaaagattggggtctcatgtctcatggcagggacatgcctatgcctctgcataaagcaaaattattcatgtgtcaacagcagtacccagtccatagagtgtgctacataaatgctgatcagacaaaggtgaatgaatgaatgatacaatctggctgtagttgctggaaacagctcgggggtgtcacacacctggactcccaccctgcgtgcctcttaccagctgtgtgaacaaggagtctccccgtctcgtccgtgcctcagtttcctctctgtaaatggggtaaaccagtaattgtagccaaaactgctttgaacgtgagtcctggagaatcaggcagggcgaggttcgaatcccagctctgcctctgtgcgtgaccttgggaagcgactttgcctccttggggctcagtttccccacctgtaaaatgggacggcctcatcctggggcataatggggacgtttaacgcggttcctggggcaaagagaatgggaggagaatcgatgccatcttctcctgggtgcggtgagtgtccaaaaaatgggcggggtggggattttaggcaggggagccccctccctcgcgcagccagaggcctcgggctggcgggggcgcatgcgcagagagccctcgcggcccctttataagcactgaggcggcgctggggccagcggagcgcagggcgcaggggctggacccggcgcggagctggctgagtcggagcgcagcgtcctttgtgcccggcggccgccccgggatgcgtccgagctaggagccaggtgggggatccgtgagggggccgtgttgcgggagaagacttcgggattagagacagagctcaggattagggagaggacctgagaccagggagaagtccccagaatggggagggggctgaagcgggggaggggagccctaggttgaggagggagcgcgaactgggagggggcttgggaatgctaggtgaacagacatttggggaggaaggttgtccgcggaatccggagactaccccccggtggggagggggccgggctgggggtgggtctcagggttgaggagggagcaatgggaaacagggctaggggaggggccccccgagtttggagggaagaagaggacacccagatgccgaatgggggactctggaacagggcacccccgtatctcagccgagacaccccaggattttaagtagggattcccaatttgcggttgaatggaggattccgggccggactgcagtggggagggggcccccagatcaccctgtgcccaatggaagggtatctgcgctgagagcgaacggccatggggaaggggctccctgccatctccctgtccttttgggtcaggtccggtcaccacgttctgactcagggaggaggtcctgggggtccccatcccaacgtggttccccgttattcccttagaccttgggttgaggtgttgtcccttatcccagggaacacactgggtgtcccaggtgaatgttgggtgggggtcccctagaccccccagctatggatccccaggacctgtgagggataccagctcagagggggggctgtcccccagcaccttcacagcctcccacgtccttacagcatgacacagacccctacccccaccccctttagttccacctgtccatatggacacatgtggaagcgctggcttggtttgggggcacaggggctgggaagtaaggggctgggaagtaagggccctgtctgggcaggagagacccccatccctacgcgtggggctttgttcctctcaggcagcatcaatgagaaacagccaggccagggagagggttggctctgggccccagcgggggacgtgggggcagggcaggcaggaaggggtgggtgcactgtgggaccccagaacccagccgtcgcaatagctgatggacattctgaaatcaagttccccctcaaggatatgggggttttgtgtgtgtgtccaccccagacaggcagggagggggagtatgcccaggggttctagggtcccctgtgagtctgatgtgactgtggttgtgtctttgtcagaaaacttgtgccgagggccacatcaccatgtggcaaaatgatgggtgtccatcggtcaccaaggccacaattatccatctcggtttgtgccaggggctggcatcgccgtgtgagtgaggagctatgtctgatgctgttccgttcatcaaggggtttatgtgggggggggggggcccgagactgtgggtgtgtgtctttgtgcagaagacacgccgcctgtcttgtaagtgcccatattgtctctctttgttaatgtcactgtgaatctgtgtgagtgtgtgtttccccagggtctgtgtctggggtgcgtggctgtgtgtgtcccgcttgtgtatctggaggggccaagggttctttccatgcggttggcagtgtgcacccttggcacgggggtgtgggacgtggtctgtgttcagagttggggcgctaacagggaaagcttgagcaggggttgaaatccccaaggggaagcccgggatgatgactgagcccatctccctttctcctccacggagttccacattcacacccatgcacactaatacaccctgactctcaggtcagaaacacacacatgtgcgcacagccccctgctgagggtcactcagactcacacacatccacagatcacactaggtcccatgtgctccacccggtgcacggagctgctgcaggctcacacacacaacatgcacccaccacatggcacaaccgccttcacacccttgccaggacacaacaccccggacacacacccagtcacaaacactcacaaatgcccattggcaaactcaccttcactcagtgctaacggagacttgaggtgggggtgaagtgaaggaggggacacacacacacttacacacacacactcacacacactctctcacacacacacattcacatggatccgagctgcccctcctccagcaccccgcaggcccctgcttgcatatgcatgaggcttgtacattattcatgagggcacgggccccagacagctgtgtaaatgctcatctctggccgccctggggaggaggtattttaagagaagggtgtgggtgtgtgagggtgcgagtggaagggagtgggagggtgtgtgtggggggtgtgcacctgaaactgtgtctgtcaccatgttgggcaacctcagtatatttttagcgtatacatgaggctttgtgtctaaagagctgtttttaaatttaacatttctaggactttgcaagtcttaggtcatttcatcctcacagtagctgcaggtggtacttgctggataatctccattttacaggtggggaaactgaggcacagagagattgaagcagcttgtcccggattagaagcagagctatctggatgtagtctgacctgttaacggggtgtgtgtgtgtgtgtgtgtgtgtgtgtgtgtgtgtgagagagagagagaaagagaattctctggccttgtcctctcgtaaggccctgctgggggcaggtgcaacccggagtcctgtctctctctaatacctggccaggcctggaacagccatgaggggaccccacacttgctcagggttccaaggggaagaaatgagaacagcctggtgaaggcagaggttgctgaggtttacaagttggtagttgggagcactggtccagggtctggctttgacctctaccctgctgtgcagcctgaggcaaacctctagccctctctggtccctgaggcatcgtgttagcaggcaggaggcaggggtggactaggtgggctttgccgctgcgttgccgcctcagagttcagcaccacggacaggtcccaggccggcctcccagcaggggactctgggagctgggaaggagaactggggaaagggacagctgtcacatacagcctccccttctggactccgttcacaccccttcctcagggataatttcttatgggggcggggagcaaggattgggtttgcagatgatgttctaattttccatctgcgcccacctcctgagccctggtgaccggggttcgcaggagtgggaggttttggggagggaccacctccccaggattcctagtctctggaacaatgtgaagtcaggaaatgcactgctgtgtcccaacgactggcatgggctttgctcacagtaggcgcttaataattgtccactttatccctatgggtcctagcccctatagggaaatggacccacaactgaagtttctctgtgggcctaagaagtatctttgttgagctgtgtgaagtcaggaggaggatgggtgggcaggggtgagccccttcctccagctgggagttggcggctcctccaaaatcccagaaaccaagaatagaatcttggtgacaaccaaatcctggaattgaagctgcgaatcgtgtcagccagcaaacccagattaaaggatggcttagaggccagcctgctgcctggactgaggatgctgggaggactgggacagactgctgccctctaggagccgccagtctgatggaggaggctgacttgaaaaatggtatttcagtcttggctgtgttaaggtcggtaataataatagcagcagctaaaatgtaccccttactgcatgagacagttctaagcattttatatgtattgactcatccattcctttcaactacctgatgttatccccatctgacccacaaagaaagtaaggcacagagaaggtaagcaacttgcccaagatcacacaaaaggaacagtgagccaattccagatttgattcactaccagcacccaggcttctgaccacagacttcattgcttggattgttttttgttgttgtgttgtgttttgttttgttttcagtctcgcgctgtcacccaggctggagtgtggtggtggaatcatagctcactgcagccttgaactcctgggctcaagcaatcctcccacctcagcctcctgcatagctgggaccacaggtgtgcgccaccaagcccagataattttttttttttttgagacagagtctcaccctgtcgcccaggctggagtgcagtggcgtgatctcggctcactgcaacctccacctcccgggttcaagtaattctcctgcctcagcctcctgagtagctgggattacaggcgcctgccaccacgcccagctaatttttgtatttttagtagagacggggtttcaccatgttggtaaggctggtctcgaacccctgacctcgtgatccaccctcctcggcctcccaaagtgctaggattacaggcgtgagccaccacgcctggctgctaattttttaaatagaggtaagatctcactatgttgcccaggctggtctcaagcttctggcctcaagcagtcctcccacctcagcctcccaaagtgctggaactataggcgtgagccaccgcgtccagccactgctattctgaggtcaagtggccctgggttcgaattctggctcagccctttgctggctccttctgtgacctagaataacacactggtctctctgagccctggtttcctgatctgtagagtgggggagtttggtcctgcaatgctgaatatctgggagggttgggctgtggctcacccctccctccctctccattttgttccagatccaggatgggggccccgtttgtctgggccttgggccttttgatgctgcagatgctgctctttgtggctggggaacagggtgagttggtttgtggggagggagagattggggtctaggggatggacaagatggggcagcttttgaattccagagccttctcctgctggtctcctggcatgggctagagaataaaatgagaatagattttaaaaggtctttgaacagtcaaaagcgaacaggatacctaagaggttatttttagtcattgtcagcagaagctggagattcccgcctctcatcgttttgctcagatgaactggagagaaagaaagaaagaaatgagaatagtgcagagattgattagtgatgtctgccaagggtggagcgatggaaataaaggtctgtgtccctctactggtggtcaagagcccaggttttagaaatccctcacagatttggtctgtgaccttaggcaagtataattatctctctgaacttcagtttcctcaactccccccaaagagaatgagacattgctactctgcagatggttatgaaaatcaaatgagctgattgctataaagtgcctgttacaaagatggtactctgcaaacaccatttccttttcattagctgtcttttgctttacctttcggaaaaactggggctcagggaaggaaaatgcctctcccagggccatacagtgaatcagtggcactggagtgaaatccctgtccttataaaaataaagtgaggggctaggcacagtggtttatgcctataattctagcactttgggaggctgaggcaggcagatcacttgaggtcaggggttccaggctagcctgcctaacatggtgaaactccgtctctacagaaaatacaaaaattagccaggtgtggtggcacatgcctgtaatcccatcttctcgggaggctgaggcatgagaatcgcttgaacctgggaggcgaaggttgcagtgagccgagatcatgccactccactccagcctgggtgacagagtcagactcaaaaaaataataataaggctgggtgtagtggctcacccctataatcccagaactgtgggaggccaaggtaggtggatcagttgaggtcaggaattggagaccagcctggccaacatggtgaaacccatctctactaaaaatgcaaaaattagccaggcgtggtggcacacacctgtaatcccagctactggggaggctgaggcaggagaattgcttgaacttaggaggcagaggttgcagtgagctgagatcatgccactgcactccagcctgggagatggagcgagactccatctcaaaagtataaataaataaaagaataataataataaggggctgggcacagtggctcatacctataatcccagcactttcgggaggctgaggtgggaggattgcttgagtctaggagcttgaggctgcagtgaatcatgatcatgtcactgcattctaccctgggcgatagagtgagactcaatctctaaaaatagttttttgtttttttttttgagatggagtttcgctcttgttgcccaggctggagtgcaatggtgcgaccttggctcaccgcaacctctgcctcccgggttcaagcgattctcctgcctcagcctcctgagtagctgggattacaggcatgtgccaccacacccagctaattttgtatttttagtaaagacagggtttctccatgttggtcaggctggtttcaaattcctgacctcaggtgatttgcccgccttggtctctcaaagtgctggggttacaggcatgagctatcgcgtccagccactgcttggattctgaggtcaagtggccctaggttcaaattctggctcagcccttttaaaaaattttttaaaagagggaaatagcagtccctgcttggttcttgcctctgaatcaggccctctctccaccttctccaacccaggcacacaggatatcaccgatgccagcgaaagggggctccacatgcagaagctggggtctgggtcagtgcaggctgcgctggcggagctggtggccctgccctgtctctttaccctgcagccacggccaagcgcagcccgagatgcccctcggataaagtggaccaaggtgcggactgcgtcgggccagcgacaggacttgcccatcctggtggccaaggacaatgtcgtgagggtggccaaaagctggcagggacgagtgtcactgccttcctacccccggcgccgagccaacgccacgctacttctggggccactgagggccagtgactctgggctgtaccgctgccaggtggtgaggggcatcgaggatgagcaggacctggtgcccttggaggtgacaggtcagttgggggcaaaggaggggccgggggccggggagagggagggctgagcctggagcccacccactgaatgtcaccttagaaatcactccctgagacctggcctggtgtctcatgcctgtaatcccagcactttggcaggccaaggcgggtggattgcttgagcacaggagttcgagaccagcctgggtaacatggtgaaacctcgtctccacagaaaatacaaaaattagccaggcatggtggcacatgcctgtagtccagctacttgggaggcataggtgggaggatcacttgagactgggaggttgaggctactccactccagcctggatgacagagggagaccctgtcacaaaaaaaaaaaaaaaaaaaaggaaagaaatcactctctgaaccgggattccctttgaattcttctgataaagtcctaaagtctttatggtgcctataatctgagcactttgggaggccgaggcgtgtggatcagttgaggtcaggagtttgagaccagtgtggccaacatggtgaaaccccgtctttaaaaaaaaaaaaaaaaaattagccaggcatggtgatgcatgcctgtgatcccagctacttgggaggctgaggcaggagaactgcttgaacccagaaggtggaggttgcagtgagctgagattgagccactgcactccagcctgggccacaccgcgagactctgtctcaaaagaaaaaaaacgtctgtatcagtatgggtactatcttgtctttaacacctctcttttttagctatgagagaggagtctccagctcagacttctgggggccacaatatctaggcaggatttttgtttgtttgttttgagatggagtctcactcttgttgcccaggctggagtgcagtggtgctatctaagctcactgcatcctccgtctaggcaggattttacttggagtcaattttatggttatctgattttatgtaagacaaaggatactggctttctatttaaaatagaaataaaaaattccttgtaaaataaacttaagtttttttctaagtgaggcaattttttaaaagtaagttaatttaagatgtatattaaatattaagcaagaacaattctcaaatacctgtttaggcaattcttttttttttttttttttttttttgagatgggagtctcgctctgtctcccaggctggagtgcagtggcatgatctcaactcatcgccagctctgcctcccgggttcacaccattctcctgcctcagcctcctgagtagctgggactacaggcgcccgccacagcgcctggctaattttttgtatttttagtagagacggggtttcaccgtgttagccaggatggtcttgatctcctgacctcgtgatctgcccacctcggcctcccaaagtgctaggattaccaggcatgagccaccgcacctggcaaccaattcctttattaaattcttcttgttgagctgcgtgtggtagtgcacacctgtagtttcagcactttgggaggctgaagaggaagggtcacttcagccaggaattcaagaccagcctgggaaacatagcaagaccctgtctctattagaaaaacaaaaacaaacaaacaaacaaaaaacaaaaaacggggatgggggcccagtggctcatgtctgtaatcccagcactttgggagaccaaggcaggagaatcacttaagctcaggagtttgagaccagcctgggcaacatagtgagaccttgtctatacaaaattccaaattccaaaacattagccaggtatgatggtgtgttcctgtagtcttagctactcaggaggctgaggtgggaggattgcttgagtcccaagagatcgaggctgcagcgagccttgatcatgccactgcactccagcctgggcaacacagcaagaccctgtctcaaaaataataataatatggctgggcgcagtggctcacgcctgtaatcccagcattttgggaggtcgagacgggtggatcatgaggtcaggagttcgagaccagcagatcatgaggtcaggagttcgagaccagcctggccaagatggtgaaaccccttctctactaaaaatacaaaaattagccaggcatggtggcacattcctgtaaccccagctactcgggaggctgaggcaggagaatcgcttgaacccaggaggtggaggttgaggtgagccgagattgtgctattgcactccagcctgggcaacaagagggaaactccatcttaaaaataataataataataataatacaactaaataagccagatgtggcggctcacacctctaatctcagcattttgaaagactaaggcaggaggattgcttgagcccaggagttcaagaccagtctgagcaagatggtgagacctcgtctctacaaaatttttaaaaaaatattagcagggcatgctagtgtgcgcctgtagtctcagcttgtcaggaggctgaggtgggaggatcgcttaagtctggaaggttggaagctgcagtgagctgagatcgcaccactgcacttcagcctgggtgacagagggagaccctgactcaaataaataaataaataaatagtcaaaaactaaaaataaagaacagggtttggcacacagtagatgctcaataaatgactcagtgaatggattattgtacagcaaacatcccgtggactcctgctgggaaacctgtttcccttaacttaaattgaccttgggcaagtccctgattcctgtcttggggcttaacctgcatgcccccaaactgggaactggggacacagtgtcttaccacatagtttatggagtcaaccagtcatcccctttcagaggcctcatttctgaaaattgataaaagctaacaacaacaacaacaacaaactgattggtggtgaggcaagtgaattccacatctaggtaacttcaatttcattcattcagccaaactctttttgttgttgtttgagacagagtctcactctgtcacccaggctggagttcagtggtgtgatcttggctcactgcacctctgcctcgtgggttcaagcgattctcctgcttcagcctctggagtagctgggattacaggtgcacacaaccacacctggctaatttttgtatttttagtagagacagggtttcaccacattggccaggctggtttccaactcctagcctcaagtgatctgcctgcctcggtcttccaaagtgctgggattacaggcatgagctgctatgcccggacattcagccaaacatttattgagcacctacactgtactggtccaatgctgaggacacagagctctcagttggataagccagagcaaagtgtttcatttcattgtcttgttcagccatttctttcatccctaaatcagaatttgaatcacagtgagcctgttaccagggcttcacatcctggcttacatgtcacctcctccaggaagccttccaggaccacatttccaggccaggcaagaaccacatttgggccgggcgcggtggctcatgcctgtaatcccagcactttgggaggctgaggtgggcggatcacgaggtcaggagatcaagaccatcctggctaacatggtgaaaccccatctctactaaaaatagaaaaaaattagctgggcgtgatggcaggcgcctgtagtcccagctacttgggaggctgaggcaggagaatggtgtgaacccgggaggcggagcttgcagtgagctgagatcgcgccactgcactgcagcctggcgacagagtgagattctgtctcaaaaaataaataaaataaaataaataaaataaaaaataaataaataaataaaaaagaaccacatttggtctcccattgctgcctgtgcttccctattagcgcatgcacttaattcctaaaaggcagaaactctctgtcagccttctccacacctcctgccacctccagggcctaaccctgggcatgaagagtgctatctttggagtcagatctctctgaatttgaattctggttctgtttcttatttgctgcgtgggcctggacctgtccctcaacctttctgaccctaagtttcctcctctagaacaatcagatttgttgtaagagttcaataagataatgcttataaatgcttttcttttttttaatgttttagtttttttgagatggagtcttgttctgtctcccaggctggagtgcagtggctcaatcccggctcaccgcaacctctgcctcctgggttcaagcgattctcctgcctcagccgccctagtagctgggattacagacgcatgccaccatgcccagctattttttgtatttttagtagagacagggtttcaccatgttagccaggctggtctcgaactcctgacctaaagtgatctgcccaccttggcctcccaaagtgctaggattacagaagtgagccaacatgcctgaacggccgtaaacgcttttcacattgtaaatatttgctaacttgtaaccctttatggccattgttatcagtttcctcatctgtaaaatgggggcatatggatcttgctccccaccctcgacccacactgtgcctggcgctaggtctattattatcagacaggggtggggagtcattctgcaagaggtaggtctgttcttgaagattccagcataagtcaactgtccccccatcctggatgttcccccacaggtgttgtgttccactaccgatcagcccgggaccgctatgcactgaccttcgctgaggcccaggaggcctgccgtctcagctcagccatcattgcagcccctcggcatctacaggctgcctttgaggatggctttgacaactgtgatgctggctggctctctgaccgcactgttcggtgagggggatacacagggcagggagatgaagactagctcatggggaaggaggttccttgggggctccaggagcacacatctgagagggaccctccccttgtgttgtcaggtatcctatcacccagtcccgtcctggttgctatggcgaccgtagcagccttccaggggttcggagctatgggaggcgcaacccacaggaactctacgatgtgtattgctttgcccgggagctggggggtaagtctgggactggcaggacccggcccctccgcctctctttgagtatctattattctccccaactcccatcctccggggtccttatgcaactcccctgtcttatacctccctaaacctgcaaccaagacatgattccactcattttctgagctttccatgcctccctgagtccccctccctccctttgcccccttcctctctctgatcctctttccctctctaatcccctgtcccctgcctgcctccctgtccctatccccttcctcctctgtgagcccccttcaccgagcccctccctctctctgaagcccgacttgcccatgggcctgagttactccatttgtaaaaagaggcttagctctgcatgagaggtaaggacaaggatgatcccggagctggacgcacagctgcggttgtcaccgcctcttctaaccaccaccctaacacgtccaggtcggaactatttggagttggacccacttcctgggctccaggggagggttccccagcccccctgacctccacccgcccctcccgcaggcgaggtcttctacgtgggcccggcccgccgcctgacactggccggcgcgcgtgcacagtgccgccgccagggtgccgcgctggcctcggtgggacagctgcacctggcctggcatgagggcctggaccagtgcgacccgggctggctggccgacggcagcgtgcgctacccgatccagacgccgcgccggcgctgcgggggcccagccccgggcgtgcgcaccgtctaccgcttcgctaaccggaccggcttcccctcacccgccgagcgcttcgacgcctactgcttccgaggtgcgtgcgtcccctggtggccgcgcccccagggctttcactttggcgaaggccacgtccctgaaagcctcgccaagccaagggagagacacatggaagctcgctttgtgataagccacatccctgggtgagggccacgcccccgggtgaaggccacacccgttacgacaagtctttccctaggagccccgtcctgggtaaagaacagggctccagaggaggccactctggtggggagtcacctttgctgggtgggctgtatctcctgaggtccggaggccccataaccttgaaagacaagcccctaggtggggcatactctacctagagccacgcccatacgcagaaacacccccgtggaagagataatgcctcaattggccacctctgggcaccacaccggatgtgggagcagggatgacactcgcccttgttggggggcagtggggacagctttggaagctgcaagcatcaaccccaaggagccatgtcctctaagtaagctgccccagtcctggcatgggcataccatgcccacggggcaccacctgtaccaggggaggatccgtcaccaaggttgagttgaacccctcaacaggcagacccaagttcatgagagttggacactacctgagctttgcccatgagccaaattgtctttttttcttttttcttttgagacagagtctcactctgtcacccaggctggagtgcagtggtgtgatctcggctcactgcaacctccacctcccttgttcaagcaattctcctgcctcagccttcggagtagctgggactacaggaatgtgccaccatgcccagctaatttttgtatttttagtagagacggggtttcaccatgttggccaggctggtcttgaactcctgacctcaagtgatccacccaccttggcctcccaaagtgctgggattacggacgtgagccaccgcgcctggcccaaattctcttgagtcctcactgcagccagttgactctgaccctgacagtggctcaggtggtctccagcctgaacagtggaggtgaaaattttgcacttccctctcccaggctgggggaatctcagaaactacttaggagagacagaggtacacagaaggcttatgctgcagcatgctggaaagtgggtagacttcaagcagaacttcccaggcaacccctgggcctaacacaacctcttctgctttctcccacagctcatcaccccacgtcacaacatggagacctagagaccccatcctctggggatgagggggagattctgtcagcagaggggcccccagttagagaactggagcccaccctggaggaggaagaggtggtcacccctgacttccaggagcctctggtgtccagtggggaagaagaaaccctgattttggaggagaagcaggagtctcaacagaccctcagccctacccctggggaccccatgctggcctcatggcccactggggaagtgtggctaagcacggtggcccccagccctagcgacatgggggcaggcactgcagcaagttcacacacggaggtggccccaactgaccctatgcctaggagaagggggcgcttcaaagggttgaatgggcgctacttccagcagcaggaaccggagccggggctgcaaggggggatggaggccagcgcccagccccccacctcagaggctgcagtgaaccaaatggagcctccgttggccatggcagtcacagagatgttgggcagtggccagagccggagcccctgggctgatctgaccaatgaggtggatatgcctggagctggtgagttgctctgggggaggcgggacctacctggggatctggaggtgagggtagagaggtagccatggctacactcagaatgagggaggaagctccaaatcccagctgggtcctctggccccagaagccccctctcccttgggcctggagtccaaccaaaggggctgctgagagatcattgtaatgattgccttgatgttgttgcaggttctgctggtggcaagagctccccagagccctggctgtggccccctaccatggtcccacccagcatctcaggccacagcagggcccctgtcctggagctagagaaagccgagggccccagtgccaggccagccaccccagacctgttttggtcccccttggaggccactgtctcagctcccagccctgccccctgggaggcattccctgtggccacctccccagatctccctatgatggccatgctgcgtggtcccaaagagtggatgctaccacaccccacccccatctccaccgaggccaatagagttgaggcacatggtgaggccaccgccacggctccaccctcccctgctgcagagaccaaggtgtattccctgcctctctctttgaccccaacaggacagggtggagaggccatgcccacaacacctgagtcccccagggcagacttcagagaaactggggagaccagccctgctcaggtcaacaaagctgagcactccagctccagcccatggccttctgtaaacaggaatgtggctgtaggttttgtccccactgagactgccactgagccaacgggcctcaggggtatcccggggtctgagtctggggtcttcgacacagcagaaagccccacttctggcttgcaggccactgtagatgaggtgcaggacccctggccctcagtgtacagcaaagggctggatgcaagttccccatctgcccccctggggagccctggagtcttcttggtacccaaagtcaccccaaatttggagccttgggttgctacagatgaaggacccactgtgaatcccatggattccacagtcacgccggcccccagtgatgctagtggaatttgggaacctggatcccaggtgtttgaagaagccgaaagcaccaccttgagccctcaggtggccctggatacaagcattgtgacgcccctcacgaccctggagcagggggacaaggttggagttccagccatgtctacactgggctcctcaagctcccaaccccacccagagccagaggatcaggtggagacccagggaacatcaggagcttcagtgcctccgcatcagagcagtcccctagggaaaccggctgttcctcctgggacaccgactgcagccagtgtgggcgagtctgcctcagtttcctcaggggagcctacggtaccgtgggacccctccagcaccctgctgcctgtcaccctgggcatagaggacttcgaactggaggtcctggcagggagcccgggtgtagagagcttctgggaggaggtggcaagtggagaggagccagccctgccagggacccctatgaatgcaggtgcggaggagggtgagtacaaagtcccggggctctgtccagctctccatggtcagggcttggggagcaggggctgggggatcccagagcagggaggaatggttgtccctggggatctggaagctttctagtggggcatgacgctggaggtaggagcttatcaggtggagttgaatttcagaaaggacattcctggcagaggaacgagcactggcaaaggccaggagatgaagtagcgcttgatcaatttcgggcacagagcatacatcccaatgaacaaagtgtgagagtagtgagtggccgggcatggtgcctcatgcctgtaatcccagcactttgggaggctgaggcgggcagatcacttgaggtcaggagttcaagaccagcctggccaacatggcaaaactccgtctctactagaaatataaaaattagccgggtgtggtggcacacacctgtaatcccagctactggggaagctgaggcataagaatcgcttgaacccgggaggcggaggttgcagtgagctgagattgtaccactgcacttccagcctgggtgacagagtgagactctgtcaaaaacaaaaacaaaaacaaagtgtgggagtggcgaggcattgagtagagtctgatttggggatgagttcaggtacaagccatgtctacatctgctttgagctggacagtggtgtgatggactggctttccaggattccccgagtctgaggaagacagagcaggacacagacgcctcccaggcgagaccagagggaggaggcatggcagggagggtttcctggacaaatgtgaatgggagctggaattcggtgatttgactcgtgggggacctcaagccacagggaaagtgggtgctggggagccatgcaaggggcgagaatcacccccattctacagatagcaaaccggggctcagggaggtaaaacgccgcttggctaatcagtggtcacacctcaactggagcccaagtcagcctgagtcttagctactctgtggccagcagcgtccatagaaatcggctgccctgttctccctggggccaggtcagcctcagctcagcctgcaaattccagcccttcttaggttctgccaaattaagctgagttttttggccaaatgaaatttagaaacaaacaaacaaaaaagaggctgcgtgtgatggctcatgcctgtcatcctagccctttgggaggctgaggtgggagaatctcttgagctcaagagttaagaccaggctggccaacacagcaagaccccatctctactaaaaataaaaagaaattagccaggctgcagtgagctatgatagttccaccgcgagaccctgcatgaaatcaaactaacaaaacaaaacaagcagctaattaataagtctttttttctgagttgcacactttttttttgtttgttttttgagactgagtctcactctgtcatccagcctggagtgcagtggtgtgatctcggcgcactgcaacctccgcctcccaggttcaagtgattctcctgcctcaaccttctgagtagctgggattacaggctcccgccaccacgcctggctaatttttgtatttttagtagagacaaggcttcaccatgttggccaggctggtcccgaactcctgacctcaggtgatccacctgccttggcctcccaaagtgctgggattacaactgtgagccatagcacccagtcgagttgcacacttttattaacaccattgatgtttaactaccgcaccccccacccccaaatttttttttttttttttttagaaagggtctcactctgtcacctaggcttgagtgcagtggcaagatcgtggctcactgcagccttgacctccccaggctcaggtgatccttctgcctcaggctcccaagcagctgggaccaggtgtgcaccaacaggcctggctaatttttgtattttttatagacagggttttgccatgttgcccaagctagtgcccgtttttttgaaggcaaagtgtcatgatgatggaaatagctgatgcaggtttcatcatccagcctgtcacttctgggctgtgttggggtgggatcttttttttttttttccttttttttttttttccagacagggtcttggtcagttgttcaggctggagtgcagtggtgcaatcatagctcactgcaccgaggctcaagtgatcctcccacatcagcttctccagtagcttggactacaggcatgcaaccaccacacccggctgtgtgtgtgtgtgtgtgtgtgtgtgtgtgtgtgtgtgtgtgtgtagagatggggtctccctatgttatccaggctggtctcaaactcctgggctcaagtgatcctcttgccttggcctcccaaagtgttgggattacagacatgagccgtagcgccgggcagttctttttttcttagatgtccaggaggcaggccgaccgccccaccccgtatcgataaaggctgacatttatgggttactgccagtgtgcttggcttattcaaagcactttactggagttatcttggttaatccttttaatgtccttatgggaaaagctccagtgtgatccttactttgcagatagggagacagacacagagaggtgaagtgccttgtgcagccatgcaactaagggagtgtcaaggctggggtttgaatccaggtcatctgaacatggggtttcttttttttttttttttgagagagagagtctttctccgtcgcccaggctggagtacagtggtgatctcaggtcagtgcaacctccgcctcccaggttcaagtgattttcatgcctcagcctcctgagtagctgggattgtaggcgtgcaccaccatgtctggctaatttttatacttttagtagagatggtgtttcaccatgttgaccaggttggtctcaagctcctgactcaagtgatctgcccgcctcagcctcccgaagtgctgggattacaggcgtgagccaccgcacctggccggaaaacagagcttctgtctcagccactaggctgcgaaatgcttagctcgttggcataaaaaagtacatgaggccgggcatgatggctcacacctgtaattccagcactttgggaggctgagacggaggatcacttgagcccaggaattggagaccagccttggcaacatagtgagaccccgtctctacaaaacaaattttaaaattagccgggcatggtgggtacctgtggtcccagctactcaggggtgctgaggtgggaggaccgcttgaccctgggaggttgcagctgcagtgagctatgatcatgcaactgcactccagcctgggggacagagcaagactccatctcaaaaaaaaaaattaatcttggggtggtggtgaggagagaagagacgggctaggtggggatcaaccctggaaagatgatcagaggggaagaagctcaatgcccaaagaaatagagaaggggcagtcagagaggtgggagggcgaccacataggaacactaaggaaacgggggttggagctgcacctgggctgaggctgagtctgtcttggacttttctggatcctgggctccacaatgaagccaaccacagcaggatggagattggcgggcagtgctggggagacccaggcagctacccacccgccgcttgcagaagaaatgctaatgaagccaaaaataaatgcagtaccagcgagtgactgagtcaccgccagtccgtgggcaggtgtcagcagcgcggggcacctggcggggctcatgtgtcccgccgcctggcagccttgtgcgtgtgcacacacgtgcagggccgtcgtccagccacaggccctgccatccacaagcccgtttgccatccatggggccaccccagggacaggcctcagctaccgcaggagggccagctgctaccttcattccgttagcaagcaattactgagtgcctattctgtcccagaccatatgttgaaaccaaatcccctctcctctgaaaactgacgtcctagagcaacattctagaactttcccagggatggaaatgttctctatccacgctaatttgaaaaatggctaggacaactgagggacgacgtttttacttttatttcactttaattgatttaagcgtgaatatctatatgtggctgccatatggaacaccagtgctctagggaaagatacagacaagaaacgattgttctaataaaaaaagtaaagtagtgctcgcttcagcagcacatatgctataattagaacaatatagagaagattagcacagcccctgtgcaaaaaatgaagcatttcattcttttttttttttatgagatggagtctcactctgtcacccaggctggaggcgcgatctcagctcactgcaacctccgccttcggcattcaagggattctcctgcctcagcctcccgagtagctgggattacaggttcctgccaccatacccagctaattttttgtatttttagtagagatggggtttcaccatgttggccaggctggtctcgaactcctgacctcaggtgatccacctgccttggcctcccaaagtgctaggattacaggcatgagccatggcacctggcctctttttttttaatttaatttttcaaaaaatttaattccactgggcagtggaatggtcagatgctgccctgacaggatctgggttggctggagcaggatgaggattttttttcagtctgtcacccaggctagaacctatgtccactcctgtgccccaattcatgagaagcacagtgatgagcagggtgtgcccaaaggaggggaaggacactgaagtcagggaggacactgaagcccatgttctgggagaagacattctacgaggtccttcaggcagccctggtctctgggagccccattccagttcagtctgaggaaggactttgctacaggcaggaaagtccccagatgctttggggcagtttctggaagcagtaaactcctcgtaacaggggtcatatgggagggagttggtgaccgctggttggggaagttataaagagggctccatagagagggtttgattagagtggtttgggggcctggggtcttgattccaggaaggcaaaagatctgtggcctgactcttccccacactacccatccatcctgcagtgcactcagatccctgtgagaacaacccttgtcttcatggagggacatgtaatgccaatggcaccatgtatggctgtagctgtgatcagggcttcgccggggagaactgtgagattggtgagtaccccagactcaggatctgaatctgaatttgtttgactccagagccttgggttgtactccagcagccatgccctcagaattcagagatcacaaaaagctggtttcagatgctccattcccaaaccccactccttgcattcagctaaatcagcccagttagtggaaccagaatcaaacagctgagctttcatctctggtgtgctgtctcccattactaccagtcagaggtgggaaggaaaagacaaaggaattatatgtctgagactcctccctgcaaaggccctttggagatcctgccctttcctgggtcggtgggaggtataagcactgccaccagaactgttgggtgctagcttcaaagcccaacacaagaaatactaccaattatgaaattacaacaacaaatataaatgacataattttttgagctctatgtgtcatcttgacttcacaaccttcacaaccacatgactgattacagaattataacaataaatataaatgatataatttcttgagctcttctattgcttccctactcacaatcatccttgagtaggagcccattattattaccattttcaaaaaaagtaagctgagtttcaaggaggggaagtgacttgcccagtgccatacgtgcctcaagcactgtctacacatggaccagtagaagaggagctcaatgaatatctagctttacccacaaacagctttgtgactctgtgcaagtctttgcaaatgcctaaaagagactccagcttcagcattctatgagcctgtttttgagagtataaccttcacttctctagagtcaggtagaacagtctgcacatcctggctctcagctgccccagtggcatctgctctcattaatgctaatttatgttaattgtatgaggttccacccccttgcctgcagagtcattgggccatctgtgcaaactgtgactgctgcacttaggtccaggatggatggtaggaccatgaccccatcttctgcttagtttcctgtgggggctcagagccaaggggaagctgacctctaactcagtctcttcccctctctgccagacattgatgactgcctctgcagcccctgtgagaatggaggcacctgtattgatgaggtcaatggctttgtctgcctttgcctccccagctatgggggcagcttttgtgagaaaggtgagtttctattgcaacaccagaaacagtaccaagagtggggttgggtgcccagccacaggcttccccacatactccaggtccctgcctccagttccatggctgtgagcctgacacaagataaattattcttttagacaaactgtgcgtaacatagaattaaccattttactttattttattatttttttgagatggaatcttgctctgtcacccaggctggagtgcagtggcgccatctcagctcactgcaacccccacctcccagtttcaagcaattttccctgcctcagcctcccaagtagctgggattacaggcgcccgccaccacgcctggctaatttttgtattttttagtagagatggggttttgctatgttggccgggctggtcttgaactcctgacctcaggtgatccacccaccttggcatcccaaagtgctggaattacaggcatgtgccactgcgcctgccctattttattttattttttttttttgagacagagtctcgctctgtcaccaggctggaatgtagtggcacaatctcagctcactgcaacctccaactccctggtccaagtgattctcctacctcagcctcccgagtagctgggattacaggcacacgccaccacgcctagctaaatttattttattttttgagacagggtctcaccctggcacccaggctggatggagtgcagtggtgcgatcttggctcattgcagctttgacctcccaagctcaagtgatcctccctccttagcctccccagtaggctgggactacaggcacacaccaccatgcctggctaatttttgtattttttgtagagacaaggtttcaccatgttgcccagactggtcttgaactcctgagctcaagcaatctgtccacatcagcctcccaaactactgggattacagccactgagcccagccaaattaaccattttaaagtgtacatttcagtggcattctgtacaatcacaatgttgtacagccatcacctctgtctagttccagaactttttcaacaccccagaaggaaactctgtgcccactaggtggtcactccctattcccattccccagtccctggcaaccactaatctgctttctgtctctgtggatttgcctgttctagacatttcatatgaatggaatctcaaaatatgtgtcttttgtgtctggcttctttcacttggcatgttttcaaggttcacctgtattgtaatatgaatcagtgtttcattccttttcatggctgagtagtattccattgtatggctatatcacattttgtttatccattcatggtttgatggatatttgggttgtttcctccagaggctaaggtcaatagtgctgctgtgaatatattcttgtatgtgtttttgtttgaataactatttgccattcttttttttccctctactctttttggtgtatactctcaggagtggaattgctgggtcatatggtaactctaggtttaatttactttttttttgtagagatggggttttgccatgttgcccaggctgctctaaaactcctgggttcatgtgatcctcctgcctcagcctcccaaagtgctggaattacagacatgagccactgtgcttggccttttttttttttttttgaaacaggttctcactctgtgcccaggctggaaagtacagtggtacaatcatagttcactgtcaccttgaactcccaggctcaagcgattctcttgcttcagcctacccagtagctggaactacaggtttgtgccaccatgcctggctaatttttatttttttaatttctttttatttttattttttgagacagggtctcactctgtcacctaggctggagtgaagtggtgtgatcttggctcactacaacctccacctcccggttcaagtgattcttgtgcctcaatctccccagtatctgggactataggcacctaccaccacacgtgactcaattttttttttttttgaagtttagtagagatggggccaggctggtcttgaactcctggcctcaagtgatccaccagcctcgacctcccaaaatactgggattacaggcatgaaccaccatcctcagcctacttttccttttaaaaaaaaattatatgtaatcccagcactttgggaggccaaggcaggctgatcatgtcaggagatcaagaccatcctggccaacatggagaaaccccatctctactaaaaatacaaaaattagcaggcatggcgacacgtgcctgtaatcccaggtacttgggaggctgaggcaggagaattgcttgaacctgggaggtggtgtctacagtgagccaagatcgcaccattacactccagcctgggcaacagagccagactccatctcaaaaaaaaaaaaattttatatatatatatctccatcctagtgggtgtgaagtgatatctcatggtggttttgacattgacaatgagcatcttttcatgtgcttgttggccatttgtatgtcttctgtggagaaatgtctgagctcccatgtccatacgaagggtgtggccccgacatcagagaaggagccttcagcattggaatgagagggggtgtcagggaatgatctcccagttaaatctcttccagaaacaaagaaaagacattaagatttggccagtgtggtggctcacgtctgtaattccagcattttgggaggctgaggtgggcagatcacttgaggccaggagtttgagaccaacctgaccaacatggtgaaaccctatctctactaaaaatacaaaattaggtgggcgtggtggcgcacgcctgtaatcccagctactcaggaggctgaggtgggaggattgcttgagtatgggaggcggaggtagcagtgagccgagattgtgccattgcacgccagcctgggcgacggagtgagaccctgtccaaaaaaaaaagaaaaaaaagaagtcaatatgggaggtgaaagggttgggagagcagagcctcaggaggaggggccaggcatggggagaggggtgatttcgccccgcagtgaccttggattgggccctctctctggtgggctggctgtgctcatggctggtaggccttgggccaaggccagccccccctcacgctcctatcccatctcccagacaccgagggctgtgaccgcggctggcataagttccagggccactgttaccgctattttgcccaccggagggcatgggaagatgccgagaaggactgccgccgccgctccggccacctgaccagcgtccactcaccggaggaacacagcttcattaatagtaggggctctggggagggggccacctgcctggagggtgggcaggggtggcacttgtagcccttttgccagggcatcgcatccctcccctggttttcaagacgtcatctttccaaagctgtgttcattaacgcaagccctgactgcttcttaatgcatgaaatctgtcaattcacttgttaattcatacattcacttcattcattcattcaccaaatatttactgagcacctgctatatgccaggcaccattccaggaatattgacacagcacagcagcaatcaaggctgactttgctttgtccccagggagtgaccatttcttggggaggatatagacaaacaagtaaatatctaagtaaataagtctatactgtaattcaacagatcctatgtgtgctgataacaaaacagggccaggagatggagggtgatgggagaagcacctgtaatgtgttcaaagacctaggagagagacaagtgttccattcatgtaatccgggacttattgatttattcattatccctctgccttctgctcatccatccatttattctgtttattccgtttgccaccatcccatccctcgtgactccttcctttcttccttccctgatttgtttctttttccttgatgtatcccactgggcctctccctcctgagcgactggctcgcgccttctcacctatctgcccgtccagcgcccactggcgtctcctgtcccctacttctcatttctgcaaagatgcaacagtgcccgggtttactcctgcttctcctggccacaaaccctgggatagcctgggcctacttccggttcttcccatgcctcacccccctaaaagagggtagccagagtccccacttgtggagggtggggtgaggatgcacctccagcctacactgaggctgggagaggggttcatgcctgccccctaccctcctcctccttcctttccctcctacctccccatcttccctcccactcctccccctcctccttctatacctcttcctccctcttccccatcctccctccccctcctctccctcctccttccattctttctcctcctccctcctactcctccccttctccctcctctcctccccttcctccttccactcatcttccacctcctttctcctctccatcctccctcccctcctccctctcctcctcccattcctcctcttcctctctcctctcctcccccttccctccccctcctccttccactcatcttcttcctcctttctgctcctcatcctgcctctccctcctcccattcatcccctcctccctcctgctcctccccaggcctcctcccttctactcctcctccttctccttcctcttccccttgctcttcctcctcccttccactcctcctcttttctcctccccattcatctcccactcttccccctcctccctccaactcctcccctcctccttccattcatctttctcctcctttctccttcccttcctcctccctcttctctccttcctccctcccattcctctgcctcctccttccactcatcttcctcctcctttctcttccccatcctccctcccactcctccccctccttcttccactgatctttctcctcctttctcctccccctcctcctcccattcccccctcctccctcctgctcctcatcctcccttccattcctcctccctcctccccatccttcttcccactcctgcccctcctccctttcactcctcctcctttttcctccccctcatctctctccttctcccttccttcccccttcccttctccagctcttacagaggttagggagggcatctgtgtactccctcacctctgtaaacttcacttctatctccttccctctccacctcaacctccagcccacctccaggctggggaaggggctgagtcttcccctcccatacatacctcacccggcccccagcccacagagaggctgagggaggggctctgggtcctcctccatccctgtacctgcttcttccctcttcatttccaccttctagatctttccccccacccagcccacctccaggctggggaaggtgaggaattctttcctcccacaccctaccccacctcacctgcagcctgtgccctgggccaggagaggcatgggtgaacacccagacccacaacccccgaccctgcaggctttgggcatgaaaacacgtggatcggcctgaacgacaggatcgtggagagagatttccagtggacggacaacaccgggctggtgagtggcaggggctgcgggcctaggctgctgagccacatcagccctgccatctggcctcagtttacccttttgtgcaaagttatcgcaattgggtgtcagaggtctctagtggctccaagatgctggagttggcaaaggagcttcaagtgaaggctaaaccttctcccctgacttccccagcccaagtaaacagaccgcgcccacgaagctgcagaggttacaaacctgagactagggtctgatgcctcccctactcactctgcctggtcccccagccatggtctctcaaatattctcatttctagcctgggcatgatggctcatgcctgtaatcccagcactttgggaggccaaggtgggcacttgagactagcctggccaacatggtgaaaccccgtctctactaaaaatataaaaattagctgggtgtggtggcccacgcctctaatcccagctactcaggaggctgaggcgtgagaatcgcttgaacctgtgaggcggaggttgcagtgagccgagatcactccactgcacttcagcctgggtgatgatagaacgagatcctgtctcaaaaaaaaaaaaaagtatatatatgccaggctggtggtccatgcttgtaatcccagcactttgggagactgagtgaggaggatcacttgagcccaggagttcaaggctgcagtgacctgtgatcacatcactgcactccagcctgggtgacagagcgagaccctgtctctaaaaacatattagctcagcatcctccctgcttcaagccctcccagactctccattgttctcaagataaaaattccccttctcccgctgtgtaaaaatctggcggttcctcacacagttaaacatagaagctgggcacagtggtacgagcctgtagtctcagctatcgggaagctgaggcgggaggatcacttaagcctaggaattggaatccagcctgggcaacacagtgagacccccgtctctaaaaatataaaaataaaaataaaaagttaaacatagagttaccacatgacccagcgattctactactagatacatacccagaagaattgaaaacagagattcaaagtggtacaaaaatgtacattattcgggtcatggatacactaaaagccaagactttgccactagatgatatatattttattatatgcatatgcatataataaaattgcacttgtaccctttaaatttatacacagaggccgggcacagtggctcacgcctatgatcccagcactttggaaggccgaggcaggcagatcacttgaggtcaggagttccagaagagcctggccaatgtggtgaaaccccatctctactaaaaatacaaaaattagctgggtgtggtggcatgtacctggaatcccagctacttgggaggctgaggcaggagaatcacttgaacccgggaggcagaggttgcagtgagccaagatcacaccatttcactccagcctgggcaacagagcaggactccatctccaaaacaacacaaacaaacaaaaaattgtactaagaaagaaaaagaggctgggtgtggtagctcacacctgtaatcccagcactttggggaggccaaagtaggaggatcgctggagcccaggaggttgaggctccagtgagctatgattgcaccactgcactccagcctgggtgacagagcaagaccctgtctcaaacaaaacaaaacaggccaggcgtggtgggtgactcacgcctgtaatcccagcactttgggaggtcgaggcgagtggatcacctgaggtcgggagttcaagaccagcctggccaacatggtgaaaccctgtctctactaaaaataaaaaaatagctgggtgtgatggcacatgcctgtagtcccagctacttgcgaggctgaggcaggagaatcgcttgaacctggaaggcgtaggttgcagtgagccgagatcgcgtcactgcactccagcctgggtgacagagggagactctgtctcaaaaaacaaacaaacaaacaaaaacttgtacatgaatgttcacagccccactattcacaatagccaaggtgggaacatccaaaatacccatcaacagatgaaggaagagacaaaatgtggtccatccatgcaatggaatattgttcggccataaaggagaagttggccaggtgcagtggttcatgcctgcaatcccagcacttttggaggccaaggtgggtggattgcttgagttgtggagtttgagaccagcctgggcaacatggcgaaaccccatctctacaaaaaattcaaaaattgagacagagcgagactccggctcaaaaataaaataaaataaaataataaacaaaatgtggaatgagccaggcatagaaggccagctgttgtatgatttttttttttcatgaagcattcagagtaggcaaatttagagacaggaagtagattagtgtttgccaggggctggggtcgggagaagggggagtcactagtgctcaatgagtacagaattttggtgtgttgtgatgaaaaagttctggaaataggctgtgcggggtggctcaggcctgtaatcccaacactttgggaggctgaggtggatggatcacaaggtcaggagttcaagaccagcctgaccaatatggtaaaaccctgtgtctactaaaaatacaaaaattagccaggcgtggtggcgtgcacgtgtaatcccagctactcaggaggttggggcaggagaatcgcttgaacctgggaggcggaggttgcagtgagccaagatcatgccactgcactccagcctgggcgacagagagagactccatctcaaaaaaaaaaaaaaaaaaagaaaaagaaaaagttctggaaataacaatgatggttatgcaacattgtgaatgtaattagtgcattaaactgcacaccgcctcttgaacccgggaggcggaggttgcagcgagccaaggtagcaccactgcaatccagcctggataatagagactctgtctcaacaaaataaaaataacaataaactgcacacgtaaaaatggttaaaattggccaggtgcggtggctcacgcctgtaatcccagcactttgggaggccaaggtgggtggatcgcgaggtcaggagttcaagaccagcctggccaacatggtgaaaccccatctctactgaaaatacaaaaattagctgggcatggtggcgcatgcctgtaatcccagctactcaggaggctggggcaggagaattgcttgaaccgggacctgggaggcggaggtagcagtgagcgagatcgcaccactacactccagcctgggctctgtctcaaacaaaacaaaacaaaacaaaacaaaaatggttaaaattaggaattatgtgctatatatattttgcgctatatatattttgccacaatttttaaaaattcacttccttttctctgatgcaagatctggtccctctctactctctgagcacaccccagccccatcacgcagctccagccccactgggctttgtctgttcctcaagcagaacaagttcagtcctgcctctgagccttcacactggtggttccctttgctaggaatgctgttccctgtctgaacccttactatctttttttttttttttttgagatagaatctcactccatcacccgggctggagttcagtgatgcaacccagctcactgcaacctctgcctcccaggctcaagggattctcctgcttcagcatcccgagtatcttgggactacaggcgcgcaccatcatgcccggctaatttttgtatttttatgagagacagggtttcaccttgttgtccaaggtggtcccaaactcctgacctcaagtgatctgacccccttggcctctcaaagtgctgggattacaggcatgagccactgagcccggccttgaatccttactatctttgattctttaactctcacattgcctcctcagggaagtcctcctggacttcgggctgagatcaccatttgtcccaccatgtatcttttttctttttcttttcctttttttttttttttttgaggcagagtctcggtcttgtcacccaggctggagtacaatagcgcaatctcggctcactgcaacctctgcctcccgggttcaaacaattctcctgctgggattacaggctcccactaccatgcctggctaattttttgtatttttagtggtgatggggtttcaccatattgaccaggctggtcttgaactcctgacctcaggtgatccgcccacctcggcctcccagagtgctgggattacaggcatgagccaccaggcctggccttgtcccaccacttatctaacactgattcatgttgaaaatgaactgggtgcggccgggcacccagggaggcaggaggaccagggaggagaatgctgcagcctccaaaccagaggaatggtgtattggattacagtggtggcccccgtcaggatgggcaggacagtggccattgtagagatgggaacactgaatccctgtgagtttgaggggtctggccaggggagtcccacagcaggaattgccagaacctgggctggaacagaggtcccctgaacaactccctgccccctattcctgcagcaatttgagaactggcgagagaaccagccggacaatttcttcgcgggtggcgaggactgtgtggtgatggtggcgcatgaaagcgggcgctggaacgatgtcccctgcaactacaacctaccctatgtctgcaagaagggcacaggtatgctgtgccccctgcttcttttcctctctgtcacttttgctcactggttctctgttgcccaggctggagtgcagtggcataatcatggctcatcacagcctccaccgcctgggttcaagccatcctcctgcctcagcttcccgagtaggtgggactataggcatgcaccaacatgcccagctaatttttgtattttttgtagagatggggtcttgccatgttgcccaggctggtcccgaactcctgggctcaagcgatctgcctgtctcagcctctcgaagtgctgggattatatgcataagccattgtgcccagccttgattcatttttttttttcatgaagcattcagagtacacaaatttagagacaagaagtagattagtatttgccaggggctagggtttgggagaagggggagtcactagtgcttaatgggtatagaattttggtgtgttgtgatgaaaaagttctggaaataggccgctcggggtggctcatgcctgtaatcccaacactttgggaggccaaggtgggtgggattatattttatttttttaatttattcttattttgtttttacttatttatgtttttggagacagtttcgctcttgttgtccaggctggagtgcaaaggcatgctcttggctcacttcaacctctgcctcccatgttcaagtgattctcctgcctcagcctcctgagtagctgggattacaggcgtatgccaccacgcccagctggtttttatattattagtagagacggggtttcaccatgttggccaggctggtctcgaactcctgacctcaggtgatccacccacctcggcctcccaaagggcagggattacaagcatgagccactgcacctcgccttcatctttttaagttggtaaatgtcagtgcagccagttctcactttccaccagcgtatgagagtgcttgtttcctcccacccttgctaactctgcacattcttaaacttttgttctttgttcatctaagtggggaaaaatagtatctcattgttatcttagtttgcatgcctttaaggatgagaataaccagttgttttttgtttgtttgtttgagatggagtctcactctgtcatccaagctggagtgcagtattgcagtctcggctcactgcaacctccgcctctgaggttcaagcgattctcctgcctcagcctcccgagtagctgggattacaggcacacaccacacctggctaattttttttttgtttttgtatttttagtggagacggggtttcaccatgttgaccaggctggtctcaaacttctgaccttaagtagtctgcctgcctcagcctcccaaagttctggggttacaggtgtgagccaccgtgtctggcctaaccaactgtttatatgttgacagcctgttggcatatatttctttccctgtgaactgtcaattcatctcttttgcccagttttctattgacttgttgatcttactgatttttaagagatctttatatatgaaagaaatcatttgtatacatttgtacatccacctttattttatactttggtttatttttgtttccatttctttgtcaattttcacatcctcccccccatttattcatgtatttatttatttatttttgaaacagggtcttgcaatgttgcccaggctggagtacagtggcattatcacggctcactgcagatcacttgaactccagggctcaagtgatactcctacctcagtcttaccagtagctggactacgggtgcacaccaccatgcctggcttatttatttatttatttattttgagacggcgtcttgctctgtcgcccaggctggagtgcagtggcgcaatctcggctcactacaagctccgcctcccgggttcacgccattctcctgccttggcctcctcagcagctgggactacaggcgcacgctgccacacccagctaattttttgtatttttagtagagacgatgtttcaccgtgttagccaggatggtctcgatctcctgaccttgtgatccgcctgcctcggcctcccaaagtgctggaattacaggtgtgagccaccgcacccggcccttattttaaaatttttttgtagagacagggtcttgctgtgttgcccaggctggtctcaaactcccggactgaagcaatccttccacctcagcctcccaaagtgctggcattacaggcctgagctgccgcacccggcctttatttgctcagataattattattgccgtctgtctccttcattcccattgtgccctatgtttggtgtaagaattagaaagtgaggtgtgtccgggaggttgctgtccctaaggagctgctgatttgggtagaagagacagacagacacagtcacttccagccctgtgagataagaactgggcagaggcagggacctgttgacgagctgaggggggtgtcattcccaataaaactcagcttgagcccatgagttcaaaactagcccgggcaacatagtgggaccctgtctttacaaaaaatcaaaaaattagctaggctcggtggtgcgcacctgtagtctcagctacttgagaggctgaggtgggaagatcccttgagcctgggaggttgaggctgcagtgagttgtgattgtgccactgcactccagcctgagcgacaaaggaagacgctcttttaaaaacaacaataagagccaggcacggtggctcatgcctttaatcccagcactttgggaggacaaggtgggcagctcatctgaggtcaggagttcaagacccgcctggccaatatgacgaaacccggtctctactataaatacaaaaattagccagccatggtggtgcatgtctgtaatcccagctcctcgggaggttgaggcaggagaatcacttgagtctgggaggcaggggttgcagtgagccgagatcacgccactgcactccagtctgggagacagagtgagaccctgtctcaaaaaaggaacaaaaaaatacaaaaattagccaggtgtagattacaggcaggtgcctgtaatcccagctacttgggaggctgaggcaggagaatcgcttgaaccagagaggcggaggttgcagtgaggcaagagcgcgccactgcactccagtctgggtgacagagcgaaactctgtctcaaacaacaacaacaacaacaactagtttagccccagatgtgagcacctctctcactagagattcctctgtcccagtgctctgtggtccccctccggcagtggagaatgcctcactcatcggtgcccgcaaggccaagtacaatgtccatgccactgtaaggtaccagtgcaatgaaggatttgcccagcaccatgtggccaccattcgatgccggagcaatggcaagtgggacaggccccaaattgtctgcaccaaacgtaagtagcttctcccagagatctcaacataggtttttggtatttctagtttccaagtaagacatcctatttctccacacattgatctggcttaatgtctgcctgataatacagccttgcagataagtgagaacttaccagcctgtctgatgtttccttcatttgtgtgtgtgtgtgtgtgtgtgtgtgtgtgtgtgtatgtgtatgagagagagatggagttgtgctctgttgcccaggctggagtgcagtggcacaatctcggctcactgcaacctcccgggttcaagcgatccttgtgtctcagcctcctgagtagctgggatcacaggtgtccactgccatgcccggctaatttttgtatttttagtagagacagggtttcactatgttggccaggctgatctcgaactcctgagttcatgtgatcagctcacctcagcctcccaaagtgctgggattacaggcgtgagccaccacatccggcctggttttgttttttttgaaacagagcctcactctgttgcccaggctggagtgcgaggctcaatcacagctcactatagcctcatcctcccagtctcaagggatcctccaaactcagcctcccaaatagctgggactacaagcatgtgccgccacgcctggctaatttttttatttttgtagagataggttctcgctatgttgcccaagctggtctcaaactcctggcttcaagagatcctcccactttggcctcccaaagtgctgggatgacagggatgagccctcgcgtctggcctctttcctctactttctctcccaaggacacccgctgcatcaggccacctgcctctcaccaccttttgtcccttccctgtcctccctcacttccctgcagccagacgttcacatcggatgcggcgacaccaccaccaccaccaacaccaccaccagcatcaccaccacaaatcccgcaaggagcgcagaaaacacaagaaacacccaacggaggactgggagaaggacgaagggaatttctgctgaagaaccagaaaaaagaaagcacaacacctttcccatgcctcctctggagccttcgcctggggagacagaacccagagagaaacaagagagtccagaagtccctgaaccccaaaccacatcccccacacacataatcctttgtacaaagctcctcttttccctttttttacatacacaagatcctcttggcaggtggagccaggtgtctgaaaagttcattctcgtctggctgaactctgggagtgtgtcccagctgagggaagcacaagtagcaaagctcattggtctggtctcttgtttgccaggctgattgaagcaggccttgatgagggtgcatgagtgtatgtttgcattcacatgaaggaattgcttttcacaccagaaattcagacttagtcaatgttggctgaattcctaaatccaggaagaagcctggacgtagggtcattagctttgggaatagaaggctacacagaagcacactgtttttgaacttgacaacagctctccctttaccctggacttcagcccaagttccgtctttggtcttggtggataaacacacagtgtggagatcccacgtactgcattttagggatgtttttaggacaacctccctccatgccttcagagttaggagtgagaatgatcaaagcaatatgtaggtgatggagggagagtgtattgctaacccttccaggtctagtccagcgctgagatttggtggttctgcatgtgtgatgaatctctttcacacaaatagacgagaggatatttagggctagatgagcccagatttcttccccctccatctctcagggagacaaagaacctccttcctggaccaaggaggtgctgccaagttttctagcccagtgcacatacccagtccttaagcagacattggtagtgcccctgccctgggtcccactcctgccccaccccacccttgtccctggccattgcctggtggtctagaaacacttaaaacttgaagtagtgacacctacctgcggtcatattgtagagagatgctcagtgttaaaactgaaacacacaaacacacacacacacacatttttctcttgtagattttaattttttaagtgggaaagaactcaccttgccttcctcccccaaatgtgcaacctgtaaaaggtctctccacaccaggggccaggatccagttccctcatctctggcaggaaagatccacagcttttcctccatgtctgttactcactttcagcagtccgggtaaaatctgtggatcagggttaaaaaagcaccgtggagaatggccctcttcaggaaagaaaaataagcaaatgaatggtccacctaggggttcagtaaagaaagaaatgtgttaactgagcctgaatcccttctgggaagtaataatgaccattgacaactaagaagtagacaccatgctaaagacttacatacaatctccttgaatcttctcaatagcccattgacttagaaactgttactttcccattttacacacagtgaaactgaggctcagatataaaggaaaggtactggcttgaagtcacaaccacgacaggagtaaggatttggaataaggatttggtcctgttttctggaccaaatccttactctggctctgcttacactttctctccatcaccaaatccttactccaaatccagaagtcagagccaactcccatcttggttctgacccaaatcctgctctggactctggagaggagattgaaatataattgcaccctcatacacatttaggaaatggttaagaagtgtaaactgaacccttatccttgtcttcaatcttcctccctgtagacatctatcttattatggttattattcagaaaacccagggatacaggtttgtcttcttactttgataactcttcttagtttaaaataataataataacacatctttggtcatctatgtcacacaaaaattttcctttgtttgcggggggctggggatgcagtgttttttggggggtcttggtttatgctccctgcccttgagcccctcagccgtttgccctgcccccacctcggctccatggtgggagggggctctggtcttttctaaagtgggcggtttgtcttttgatctttcccttttggatgtgcgtgtgtgtctgcgtgtgccatgtgcgtggcacgcatatgagtgtgtgtgcgtgtgaacggctttgggtcctgctggttttgctgtgagctgcagtgttctgtgggtctgtggtatctgacactgtggacattaatgtacttcttggacattttaataaattttttaacagttcaacctgcccgtcaccacctgataccttcattcattcattcattcagcaagtatttacccgagcagctattgtgatccatgtactgtactgggtgctggggagatagtggtgaacagagaaggtttggtctttagtgggtagtcacagaaggcttccccgaggaggggaatggaatctaaagaagaagtcgcattaactagatgaggagagaaagaaaggaaaggcattccactcagaggaaagagtgaaagcaaaagtcttcttgcagaagggagcgggcgcagtggctcatgcctgtaatcccagcaccttgggaggccgagccaggcggatcacagggtcaagagatcgagaccatcttggccaacatggtgaaaccctgtctctattaaaactacaaaaatcagctgggcatggtggcatgcgcctgtagccccagctactcaggaagctgaggcaggagaatcacttgaacccaggaggcagaagttgcagtgagctgagatggtgccactgcactctagcctggcaacagagagagactccgtctcagaaaaaaaaaaaaaaaaaaaaaaagaagggctcactcgaatcagtaggaaaaagacaaatccattagccaagcaggcaaaagatataaaaaaaagtttacaaaaaaggaaatagcagctctaaaactacaatatagactcaataaaataatacacattttgcaagaacatctagattcacaaggaaggacataaaaatataagagaataaacaaatgtatcaaaagatggccagcatggtggttcacgcctgtaatcccagcaatttgggaggctaaggtgagcagatcacatgaggccaggagttcaagaccagcctggctaacatggtgaaaccctgtctctactaaacatacaaaaattagccaggtgcggtgatgcgcacctgtaatcccagctactcaggaggctgaaacaggagaatcgcttgaacccaggatgtggaggttgcagtgagccaagatcacaccattgcactccagcctgggtgatagagtgatctccatctaaaaaaaaaaaaaagatccttgcatatatcaaagatgataatgtgcttgaactgtgaatgatttacgatttgctcgaccgcctgcacctaaggtcaaagttggtggtggtggttggagatgttcaacctcacaaatagaaacgcaagcaacaaccacattgagataccatttttcacctatcagattgacaaaaataaaaagtgacaagacatgaggctaatgaggatgtgtggaacaggtgagtacttttttttttttttgagaaggggtcttgctctgttgcccaggctggagtgcagtggtgcagtctcacctcactgtaacctccgcctcctcagttcaagtgattctcctgcctcaacctcccgagtagttgggattacaggtgcctgccaccatgctgggctaatttttgtatttttggtagagatggggttttgccatgttggccaggctagtctcgaactcctgacctcaggtgatccacccgcctcggcctcccaaactgttgggattacagccgtgagccaccatgcccagccaggtgagtatatctattacctgtggagtataaattggccccatctctaagaaaatgtggaaatcactatgaaaacggcgagttttagtctgggcacagtggctcatgcctgtaatactagcaccgtaggaggccaaggcaggtggatcacctgaggtcaggagttcgagaccaacctggccaacatggtaaaaccccatctctgctaaaaacagaaaaattagttgggcgcagtggcaggcgcctgtaatcccagctactttagaggcttaggcagaagaatcgctcgaacccgggaagcagaggttgaggtgagccgagaccgtgacattgcactccagcctgggcaataggagcaaaactctgtctcaaaaaaaaaaaaaaaaaaaaaaaatggtaaatggggagttttgaccctttgaacaaacagcttctttttttttttttttttttgagacggagtctcgctctgtcgcccaggctggagtgcagtggcgctatctcagctcactgcaagctccgcatcccaggttaggccattctcctgcctcagcctcctgagtagctgggactacaggtgcctgccaccacgcccagctaattttttgtatttttagtagagacggggtttcaccatgttagccaggatgatctcgatctcctgacctcgtgattcgcccacctcagccttccaaagtgctggtattacaggtgtgagctgccgtgcccggcctgaacaaacaacttctgatatcatcctccagttatacttgaacttgtgagtgatgatgtggatacttacttctagcagaaacatattgagaacaatataaatgtccaccattaggaacctgactacaaaattatgatgcattcaatccaaaccattgatcctcttcagactgtcagaagaatgaggaagaggagatttacttatttttattttttgagacagggtctcactccgtcgcccaagctggagtgcagtggtacaatcatggctcactgcagcctcgaccttctggctcaagcaatcctcccaccttggtctcttaaagtgctgggattataggcatgatccactgtgcacggtcaggaccttacactattttttctcttcatgctttgttgtatcctagaaacttccagtgcttcctcagcccctgccctcagcccacatattcatgtcagggaaagtttgtaatgtctctcccttcctggtacaggaaccccccttccagtttcccgaatttcatgccctggatcttgtcaatgacccagtcaggacagagttgacaaggagcagacccatggtgggtggctaaagggagacagtgggcacaggatgggggaagaaagaggagcaagagattggggaggtgggggaggaatgaaggaccccacttccaaagagaataaaaatcaagcccggccaggcgcagtggctcacacctgtaaccccaacactttgggaggccgaggtgggtagatcacctgaggtcaggagttcaagaccagcctggccaacatggtgaaaccctgtctctactaaaaatacaaaaattagccgggtgtggtggcaggcacctgtaatcccagctactcgggaggctgaggcaggagaatcacttgaacccgggaggcagaggttgcagtgagccaagattgcacgactgcactccagcctgggcgacagggcaggactccatctcaaaaaaacaaaacaaaaaaaaccccaagccccccaagcttgtaacatcttatctaccaaagtgcatttatacaggaattacccactggctgcctcattttctcattcatcaaaagaaacaaggatttattgagcccctactgtatgcttggcactcacggggaccacagaacagccctggtacagtgggagaacacaggttcagaaggagtttgtcacttggtcacacagtgagcaagaagaggcagaattcaaacccaaaccgacctggtcccaaaactcagagataggtttcctagagatgacgtgacagtaaagagggccccagggggaccccagtactcctgcaggcaagacttcgggactggggtctcccacggccgggatggccttgtccatggatcatgtccccccagctgcctgtcaacgccgaggacttcggctgggtcctgacctcttagcacagatcgccgcttagagcctggtgggtgttgaattttaaagaacattccatccctcctggatctctaaggagggaaatgtgggtgggggtcagggaaggagagaggaactgggtgagaatggagatggggtctcagaggacaaaagaggagctcagtgcttgcatatctcaacagaccagggcacgccataggctcggtttcctcatttgtaggacgacgacaaacatgcccgggtgttgcaagattgtctcgtgcacagctgctatccggcatagagttaacgtgcaaacggagggtggcttagcagctccagaagtccagccctgtctggggaaggggcagccatcaggcccctgatggggtgcagtagggtagccctagtaggaggcacccaggacttctggcccacaatgagaagttcctgagaactggaagtctggttgtcatgaggacaacgttgacagtctctatggcaacagcttggtgaacagggccccgttgtccacaaggaaaagcctagggggacaggtgttctgttacctcggactccagagtttggtcaccatggcaacagtggtggggtccaaaccgcctgggggtggagcatggagggtggtctggaactggagtgggcctggggacagggacagtttgtttccatggtgagagccggagaactggatgttgggtcaccctggcgacagcttcggggagggtgatctccatggcggtgagtcagggtagggacagccagaagttgaggtggaggtctctggggtgggggccaatgagatgagaaatgtgtggtatccatggttacagctggaggagggaggcactgtcttcatgggtgtgcctgatgagggaaggggtgtgtgactctaggtgacaggtagcagcaggactggttgccttggtgacagtgggacccaaggcaactgctctgcataactagtgacatggatcttaccggtccccaggcctgggaagatggtctgtttggtgacagttgggaaagggacgtcagaggacagggtgggtttgctctcccttcaaagaaatatctgaggggtgggacgtggcccccagtaagtgagccagctggctgtgtgtcagtctgaggtggcagatgggggtgctcgcccatgaaactagaggggtgtgccctgttacccagaaactgcaggggactctcagggagagggggagaatgggagtctccaggactcaggtcaccataagggaaaataagcgcctcggcccacaacctccatgtgaccacggggagtgaccctgaagttcctgtagtctctccaggtgaggaggagggggaggaggaggcgcccagtgtcccacgtgaccgcaagggactagtgttcagtctccagtgagatgcagaaggtgtacggccggtctctagtcaatcccgggggtccagccaccaggcgaccacgggggcagttggtctgtttccaagtggtctcaggaggcgtggccagtcttcaggagcctgcgggttctgctggcctcctgaggtcctcagggggcgtgaccctcatggagaaagttggggagttgggggaatcctctatccagaagaggtgagggctggccaggctccagggaactccaaagtactgttctgccaggactagccagtcttcagggaccccaggggcacagttagtttgtaagggaccacagggaatgtggccagtgtccagggcttcaagggcgtggccaggctccaggggaccacagggctctagaccagtggtcaagcgccctggctgtccgcctactcccagcctagacgtgcagaggggtccaggcagcaggatcgcgcgcgccccctgcccagccgccgccgcccgcccagccccagccccagccgccaggtgccgggtccggtgctcctggagcgcggtagcagtagacgccgaagagccgtcgggtggcgtccgggaagccgaggctgcgcacaccaggcctgcggcctccgcagcgcgctcgcgggttcacgatggggtagcgcgcactgccatcggccagccaacccgcggtgcagcggtctagcagctgcagcttccacgcggcgaacagctgccccaccttggccacggccgcgccacgcgcagcacacgcgcgcgcagctccggagaagggtacaggtcgcagcggcttcaggaagaacacgcgccctgcgggggtgaggtggggggtgggttattagtgcggctcctgggaccctgcttcggtgggattcaggactgccccccgcatgcagcctaggactctggcctcggccccgggatccaggaacagttcctcctttgcagcctgggaccccagcctaggcccaaccagcgttggtaccaggcggtgtgtgctgcgcctaggcactcttgggagaggggtctcctgtttctgatcgctaagagctgggtggggaagaaggccccggggttggggtagtgttgcagcagaggccagtcttggggtgaggcctacgcacccggcaggttggacgtgaagcagaaggcgtcgtagcgttcctcggcgttatggcgatacccgtagttgcgcaggcccccgttggcatcaccgccgccccctgcactcccggtcccccccaggccgccgcagggctcccggggccggttcacggggtattgcactgagccgtcgcgcaaccagcccgcgttgcaccagtccaggccgtcgcgccaggccgcgtgcagctgttctgcagatgccaggatgccgtcctgctcggcgcacgcgcgctgcgcctccgcgaaggtcagcttgtatcggcctccacgggggtggtagggaaagaccacgcctggcggggggcgcacgggatcagcaggtacaccccagcccaccctcatgcacctgacgtctggggtgctatgtgactcttcaaccgggacctttcagtccattcctcctcactctggcctcagacctgaccacgatcctccccagctcacaccccatatagctgtctcccttcactttaagcttgggattcacttgaccctcccccttaacatactatttgtgtccatccccttccacctctggaggactttgctcatgctctttccaccttattctacctgttgaactcctattcatccttcaaaatccaactcccaaaccctcttccattgagtcctgtgtgcctctgacattccgccagtactgggtccctccctctggtccagccctgagcccacggagcctgcgttcagtgctgactctcctagactaggaccccctggaagattggccctaggtgaagacccctttgattcccccagcattgtccaagggagtacccactgggttcccttctaccttcagttctgatgactttggaacttgtccctcattggactcacagtccgttcagctcaagtattttgtgtgtctgtgtttgagggacgcgggttgggggtgagtggggtaccctggaaagaggcagacagggtccagggagaaggcctggagctgacagactggggattgaatcctgtctctgccaccaactagcactgtcctgggcaaggctctaacctctctgagcctgttgtccatctgctggtaatagctgtctcccttggggtttttaggaaattaaattagagactcctgagaactcttcaactaagcacctgccacagaaaatgtccagtaaaggagagctgctgctattattgttgttatttgttattgttagggaggtcagcaagcaagggccctgaaatctcacctagaatcttctaaagagaactggaaaaggccaatcaaatgggagggaattcttcaaatagaaaccccacctcccagctccagggtgagccaatcagagcatcccatcttccagctacagtgattggctcacagttgggcacatgactcaagctgagccagtgagggacaactctgggactctagctgctgctcctaggaaatcagttgctaagcagggaagtgaaagcctaggcactgtggtcttggttccagaaagagaagcctgtcggaagaaagcctacctgggaagcagagcagaaggatggttcctgacacggtgtgagtgcctggatctcactgtgcctgaatcctatcccaggacttctcagtgtcctcattgtggacattttggactggatcacttttattttattttatttatgtatttatttatttatttttgagatggagtctcgctctgtcgcccaggctggagtgcagtggcacgatctccactcaccgcaacctccacctcccgggttcaagagattttcctgcctcagcctcccaagtagctagaattacaggaatgcaccaccatgcctggctaatttttgtatttttactagagatggggttttggcatgttggccaggctggtcttgaactcctgacctcaggtgatccgcctgcctcaacctcccaaagtgctgggattacagtcgtgagccaccatgcccggcctggatcactccttgtgggggactatcctgtgcctggtaggatgtatagctgcatccctggcctctacccactaggggctagtagcaactgccttctccagatgtgacaacgtaaaatatctccagacatcgccaatgtccctggggaggaaaatcacccagaaccagatatgggggctctaccccaaccaaccttctaaatgcctgcaggccaacttgatttggtttatgtcccttgccatccccgcccccctccttcctcagaagcaaggtttatcctccccaccggctgatcaccttccaggtccagcttgaccatgccagcgtcatcttccagctcattggtgacttcgcactcatagcgcccgtagtcttgcagcgtgacgttgcggaggaccagggaggcatccccaggcccgtcgccctgcagctcagcccgcccacggtagctgccgaatgcccggtgctgggggcctagtgccacgaagacgtcggtgaaggccagcgggtccaccacctttgtccacttgagccggacgccgtcgtgaccgtgggcggctgcctcatagtggtagcggcagggcaagacgatggtgccaccacggtggcttaccacctgcccaggcgctgtctgtaccactaccgagcccgactcaccctctgaggacaaccaagcagggttcagaggaggggcctaggggcagaagggggcctctggggaaggtgtctctggggaggggaacgtgggaagactcgggtgggggtcggggaatcagaagggtccaggggctcagggagagggcgaggggctcagatggggagtggctgggggaaccgcggacgtcaggaacgccctacccgctacccctctccgcacttggccacttctgcttttcgcggagaagaccacttttagcggccctgactcacccagcacgtgcacgaccttcttccggccacgctgcgcccccgcaggggctgtgagcagcaggacgccccaggccgcggcccagagcgcgccgggaccgagggccgcccgagcgcacacctggggggcgggcacggggcgctcagtccagcctcccagccttggcttttcggaggcctggctccctcccgggcctgccttccccacagcgaggacctctctcacgcccatgtccccaccctttccggggtcctggagaactccccctcctcctcttgggacctcacatcctagcttctgcaagaacccacgcccctagactcccccccgccctcagtcctgccccagatcccgcctcattcccccccaccccaaaacccgaggctcgctgccccgcccccttctggccctggcccgggccggggataggggggtggggaagagctggaggagcggcggcagcaaggttatccgtgcgccaggagactgcagcaaaccgggccggggcgggcagggaggggggagagctggagagaaagagggagagacgcggggagagaacagggacagagagaaaggcagggagaggcagagaagagagtgcgcgacacagaaaaaggggaagggaagagagagaggcagagatggagagggagagacagatggaaaagaagagacagatgtagagggagagacagagatggagagggagagacagagaggcagagggagagacagaggggcagaggaagatacagagatggagagggaaagacagagatggaaagggagagacagagaggaagagacagagaagcagagggagagagagagaggcagaggaagagacagagatggagagggagagacacagatggagagggagagacagagaggcagagggagacagagaggcagagggagagacagagaggcagagggagcgacagagagggagagggagagacagaaagggagagggagagacaggagagtgccagaggcagagagactcagagaagaggagggagagatagggacagggaaagacagaaacggagaggagaggaaaaaggcagagaggatgacagagatggagagaggcagggagaaatggagagggagagaacctagagtgccaaaaagagagatcaaagagggtgagagacagagaaaaggaagagacagaagaaactcagagggatatagattcagaggcagagagatatagaatccaagattggggagacggggcacacaccacccgcgcccgcagccccacttaccatcttgcccgcgcggcccccgccgagcggcccctacgcacccggactgcgctccccgcacacccggttaagactgggcaggtccctgcaggcggcgcaatcccggcgtctgcctgcaaggggaggaggaaggcgggcgaggcggggtgtattaaaggggccgcgggggcccacgctcccctggagcagtggctggagcgcgggcggagaaagaagcgctctggacttggagtgcagagctagttccctcaccctgctagctgaacttaggccagggaagaacctctctgagcctcagtttaaccatctttgaaatggaggagggggctgagtcttctatcttggttactgtgctttggcaggggacctgggggatctggtgaaagagatcatttggcctgcaggccacctgtccattgggtagtcatagtggagtcctggtctccagcaccccaaaggcgctccctgtgcagggtgggggcctcacgatagtcacactctgctgtggactggagccacaggccccaattcaagtctgcccctcactggctgtgagaccttggaggagacagttggcctctctgagcctgctgctgactctttggtgaagatccagtagctagacatacagtagatctccggtaggggttgggaggggcaagaaaaagggacatctaggccgggcgcggtggctcacgtctgtaatcccagcactttgtgaggccaagatgggaggatcacctgaggtcaggagtgcgaggccaacctgaccaacatggagaaactctgtctctactaaaaatacaaaattagccaggtgtggtggcacatgcctgtaatcccagctactcagggggctgaggcaggagaattgcttgaacccaggaggtggaggttgtggtgagccaagatcgtgccattgcatatcagccggggcaacaagagtgaaaactccgtctcaaaaaaaaaaaaaaaaaagaaaaagaaaaagaaagaaagaaaaggaaaagggacatctggtcaaggtccctgacttactccaggcccaagtcgcccctaaacctggcctttcacccaatttcaaaaaatcaaacaatagcaaacagtgagtctttctcctaacaccttggcttccttccaggactcagtttcccctaaaatgagcccaacccgaccagataggagaggcagagttgtggtttctgtggtccaacaggctggggctccatctcttagctcagccatgccttggggactgagcgggggaatgatctcagaccaggaccttcacctcctgcagccttggtttccccatctggaatatggagtgagatccagcatgtagcagtcaaggtatacagtaggtgcttaataaatgtatcatgctattagttatgatttattggtagagcaggaacttttctctctggccatgaccttgggcaggtctcttgtccatactgagcctcggttttcccatctggaagatgagccgtgcataccaaccagaggccgccttctgctatcccagcacctctcactcctggcaaccacgatggcagtgataggtgggccctcatgggggccaagaagaggatcccttgcccctgcaccctgaaacacttaggcagtgatattttggaaattgaaagggtttttactgaaaggatccatggggggatgatgggtaagttctggaaggggtagaagcgtttgtgtgggagttggagcatggtgacagctgtgggaggctctccttgcaggaacacttggtcgttggtctccatcccacccactggactgaaactaccatagccaagactaaagacacccggagatgtccctcctgtctctaaaacacccaacccccgcttccccaggtagggctgactgggcacgtaaacagagtcctgggtcctgagtccacagctctctcaatgctgcttcttgtggagggctagggggtcggagggtggtggctggtggaagaatgcgggccactgaaggcaacggtaggccagcaggtgggggcccagcgcatacagcagattgcacacgaagaagcagccccaggtgtcctcaggcacacggtaggtgaagggtgtgcgcaggtgcatggaagcccccatgtgcgagaactgtgcctggtagccagacagggaagatggatgtcaggggccaggaaggaactgaaatcccagcatcaccgacagccccccaggtaggtcaggcagaacccaggggatgcccatccccacctctcgggctttgctcatctatctgtttcccatctccagtccatctatctgtttttttttttttttttttttgagacacagtctcattctgttgcccatgctggagtgcagtggtgcaatctcggttcactgcaacctccgctgcctcctgggttcaagtgattctcgtgcttcagcctcctctgagtagctgggactacaggcgtgcacctctatgcccagttaattttttgtatttttagtagagatggggtatcatcatgttgcccaggctggtctcgaactcctgaggtcaggcaatccatccatcttggcctcccaaagtgctaggattacaggcataagccaccatgcctggcctatttttaaaatttctatctatctatctatctatctatctatctatctatctatctatccatccatccatctatctatctatctatttagagatagggtcttgctctgttggccaggctggagtgcagtggcacaatcatggctcactgcagccccaacctcctgggctcaagtgatcctccaatctcagcctcccgagtagctagcacagcaggcacgtgctaccatgcccagctaatttttgtactttttgtagagacaggtttttgccatgttgcctaggctggtctcagactcctgggctcaagcagccctcccacctcggcctcccaaaatgctgggattacaggtgtgagccacctcacctggccttctgtctgtaaagattcctgcccttacatgtcctgtctgtccctccctgtgcttgtccacttgtctgtgagtcccccccaacttgcctaaccccatctcctgggccctgcaccccatctctctctgacctggctccagatcctcctcccagtcttccccaccccagaggtcttggcacaaatcctgtggattctaaatgttttcctggtccctacttccctggccggggcccaggatttagcacttttcatcaggaacccagaaaaaggctcctagctctgactgggcccctcactgctcaaactcctcctcaaacgccccatcaccctcagtacaagcccctagtcccagagttcaaagccttcagcatccagctgccaatttctcttatctgcctttacctgggttatggccctgctaagtcactctctccctctgtgcttctccttgtgctgttcccattcctggaatgcccttccctgcctggagaactcatcctcgtacatcaaagcctagctcctatgccttgcttctaggaaacctttcccctctggaatccttcacagcccctgtccctattttcatggggcttggagtgtctgtatctggctttgtctcccctagactagggaatcctgggatattgggcctggggctggggcctcttgggggctcatcattacagtgcccagggaggacaccaaaggcattgatgagtagacagaaattccctcccacatgcctgctcacccacccatccgccacctcacctggccgatgcctccagcaaacaccaaggcccagtctggaagccaggagcaaccagggaaggtgagagcataggcagccaggccgcagaaaggcaggacataaaacatgtacatcagcatctgcaggggcgggaggagaggggcaccagcctgtgagatgagcagctaccccaggtgggtctcctgagacccctgaggtggaggccctgaggaaggatctggatggcctcagaccccacccaggctctctgcaaagtgctcctctatttcccttggggatccttgcccccaacccccgaacacatacaccaaacctactaacctttctctgaaagtggcatgcgaccctggcctagccagtcggagcattccagccccctgtccatgatgctcagtaagggatgggcaagtgattcacgctgggccaatctgagcctgcctaagacttgtgcttaagctcgggggtaataagggctcacattgctctggggtggctgagtggggtgcatggaagcctgaagctgccacaggctgtctctgccaccccataaagggactgcctgagagtgaagccatgcaaagaaagcagagctcagaggccgggcatggtggctcatgcctgtaatcccagcactttgggaggccgaggtgggtggatcacttgaggtcaggagttcgagaccagcctgaccaacatggcaaaaccccgtatctactaaaaatacaaaattagctgagtatggtggctcacgcctgtaatcccagctacttgggaggctgaggcaggagaatcacttgagcccaggaggtggaggttgcagtgagccgagatcatgccattgcactccagcctgggccacaagagcaaaactctgtttaaaaaaaaaaaaaaaaaagaaaaagaaagaaagaaaagaaaggaaaagaaaagaaaagaagagcccagagtctgcaccttgagcacctggatccagccatacctgaagaccacatctgtccttttttggtaggacagtaaattccatatgggcttctgcctgtttgagttgtgcttctggcacctgcttcaaagaggcccagtggacccctacccatggcaggggtgtggtcttctccccgctcccctctcacctgcaccttagggtaggccacagggtcccgcaggtatggctcatactggtagatatagacaaagcaggcatctgtggggcaatcaagcaccacctggagcagacagacataccaagaaccctcagacatacctcccacaggaagcctcccccaccctcccaggcccacaccccttgctctggcctctcccagcccagctcaagttgggctggctgggagaaatggggctttgtcatggaacactcaggttagacttgatgaagaacttccttggatgatcaaacaggaagggcagtgtgggagaggtgggtcagggaagggagactggtggcaggggagggggagaccaaccagcgcagactcaccaggccccggaacagagtgaagaagccagcaaggatgagatatatgacaagggccaggtcagccggacgctgcaggagtccctttctttgttcctcttgcacctggcccaggggagagaaacagacagcatgagaggtagtcaatgacaagtattcagtaggtactcaataaaggttcctaaggctcctcccttctttctttttttcttttttttcttttttctttttttttttttttgagacagggtctcattctgttgcccaggcttgagtgaagcagcacagtctcagctcactgcagccttaatctcctgggctcaagtgatcctcccacctcagcctcccgaatagctgggaccacaggcatgcaccaccacatctggctaattttttaactttttgtagagttaaaaaatctggctgtgttgcccaggctggtctccaattcctgggctcaagcgatcctcatgccttggcctcccaaaatgttgggattacaggcatgagccaccgcacccagccctcccttctttcttgtgacaaaggagaaccttccacagaaattaagtctttgaccaaaagcaactgacacggggaaagttcaggcacattgggacaaggcctaagaggggtaaggcactcaccatgttggcggtgcagcgggttagcgcccggggctggctgaagaccttcatgccagcccagcatggcaccagcaggtaggggatggtgaggaagaaggcaggcctgatctcggagctgtatttgccttccatggtgcaggagagagggcatcagccatgccagaaccctgctggacatctgtttgtttgtttgttctgagacagagtcttgctctgtcacccaggctggagtgcagtgatgcaatcttggctcactgcaacctctgcctcccaggttcaagcaattctcttgtctcagcctcctgagtagctgggattatacctggctaatttttgtacttttagtataggcagggtttcaccatgctgcccaggctgatcttgatctccacggctcaagtgattgatgaggcaggtggattgcttgagccgagagttggagaccagcctgagcaacataaggattacaggcatgagccaccacacgtggcctctctggctggacatcttgattcagaaataccatcctcattcaagctccaccaccttccatggctccctagtgcccacaggatgatgtccatactccttagcctagcctgcctcaatttaccttctgaatatggatcctaccttccagtgggttctttgcttcctacaaatacaccttgagtgttccctttgctgaggttttgccatgccaacctcccagactgccttcactgctctacctcccaagacctacccctgaagctttcaccctgtccccaagattcaccctaaaattcccttcctgtgtcaagaccattctgggtcaaacccctggggctgggaaccattgcctggggaggaagcagagttgggttctcccgccttccaagaggaaacagggaccggaaaggggtgggctgctgactgaggctgtggacacgcaaagagggaggtggggcctctgcagacatcagggaagggatggaggatccaatgggggtgcttctaggtgcagggcagtgaccaagcccaagagaacctggatttcccaaagccttgtccttaccaagaatgtttcctgtaaggaacaccaggatgctcatggcgaaggaacccagccagtagagtccaaaattccggtatctcttcctgagcaggggatggaggggtgaccagcaggtagtcactccgtaatctcagagccccagccagggcctggagaccaccgtgggtttcccagctccgggtccctttcagttttgcccaggatggaagggacaacagggagttgaacggggaaataacagtgagaccctctgtccaagaacagaagtggctgcccaggcacagggtggatgtaagcaatgctaggccaccacctacacctgagacgttccctggaaccttctcctggccacccctggctggagccctagagaggcgtcctgatttctcctacagacacttctggctccaccctgccctgggaccccatctgaggatgcaacttctctcccagggtcaggggccaccctctccctgcctcctgcaccttctgcagatggcgccggccatggccaggtagaggaggtagtgaacagtgccatcccagtagcagatgaagactccgtgcgctgtgcgcaggtatggctctccctgtgggggcaggtgggagactcagacgggcagtgcggtagggggctccctggtcgtcccccaagtacctccttggtgtagaactccatgaagcccaccacatagctgtcttcctgaagagcgatgatgaggtccacaaccgaggtgaaggcgaagacagcgaagactgcagtgagtgggcgggccgggtcaggtgtgggaggggacacgtgtgggtggggctagggcttagtgtgggcggggcttgaagttaaggtcagggatgagattattccaggcaaggactccaggcccagtccctgccccaaccccaaaggttgcatgaccacagtcctgcctcattctgcatgtctgatggaggagacacagcctggctctcagaagtccctggtttgattcagaggcccagtgcctgcctttgggagtccccagtctcatgggagaggcaccgtccctgccctcaggagatctcaaagtgatgaggcagtatactctttttcaggagcttctaatctgatgcaggagatgcagtccctgttcttaggagccccagctctgaagggggaggctctttgaggttccccagtttaatgggagtgttcaaatctctttgaggtctccagtctgatgggagctcttaaagggcccccagtctgatggaggaggccccttaatggcccccaagtctgagggtggaggcccttgcctggacagtcttcttccccacagcttcccactgactcaccagcatagagtgggtcataggagacctcgccatgggacaagctgtagaccgccacgaaaagcagacccaggattagggcgctcatcaatgccacccacagggggctgtggagagggaagccaagtcagggaggccaggcccagtgctgaggcatcgccccactctccctggtgggggaaggggcagactcctggaagccccaggggaagagactaaagtgtctgttcatccatcaatgctgttccctgaaactgctctcaccctgtgccaggcccttgctcaggctgtttcttccttctggaaaccgcttccagaagtcttttccacttggcaaactcctactcatccttcatggcccatccacattgttcttcctccatgaagcgctccctgactccccagaaaggatcactgtttaactcgggctagctacagaggggatattcatcagcctgtttctttttctcttttcttttctctttctttctttttttctttttctttctttctctctctctctctctttctttttgagacagagcactgacacccaggctggagtgcagtggtgcaatcttggctcactgcaacctctgccttctgggttcaggcgattatcctgcctcagcctcccaagtagctgggattacaggtgcccaccaccacacccggctaatttttgtatttttagtagagacggggtttcaccatgttggccaggctggtctcgaactcctgacctcaggtgatttgcccacctcggcctcccaaagtgctaggattacaggcatgagccaccacgcctggcctgccccttctgactttaccatttatcccatcatttgttatgtgtttgactcagtctgttcagtcattcgacaacgtcaagcccctctgtggccaggcccagctcccaagccacagggtctcgagtgctcagttctgtagacttcattgtctgacgctcccagctcctcccagctaaagtccaaatgcctctattaactccaccctacccctgccctgatctgcacccacaacctgataagacaggtcaaccagttgcatagataacagaagccaggtctctgggcagccctcaacccaggtgggcaaatccaggcccagagaggatgggagtactgtccagttgtccagggtcacactcaagactctgtccatcactctccaggcccctattttctcatgatcccctcagaacccaagatttccatcctgaccccatctaacaatgacattatagtactcagatgagaccaagacaaatctttgtacacagtttataatccttaaccgtaactatgagatgagatctaggatcgtgcccattacactgatgagggaactgaggctcccagaggaacttggctcacccaggatcccaggagatggagatgggtattcccacccagggagccaggctcatggttaagactctctccaccccatggcttgggttgagctgggtttagaagtacgaggggcttgcagatgcccactatccggtggctggacccacagggctaggatctagggttaggagacagggaccaggaaagggaaccagtagggggaactgagtctagggacatggttagccagccctgaacaagaggaaagtcacaggcctgagacaggcaatggagtagggtgtgtgtgtgtgtgtgtgtgtgtgtgtgtgtgtgtgagcaggagtcaggtacccggggccttatctgggacaatacttttacccttggtgactttggaacctaggcagggcgcatccctgggaaaaccccagaaaccctccaaagctctggcttgtggggactcatcattccttcttcccaggccacaaacatcccaggagcggccgcatcccagcctccagcccggcgggaaggggacttccggttagaggggggtgttcttctggcccaccccaatcctgccgggtcggagctgagctggggcgcagggctcgcagaagccaggtccgcggaccgcgcatcctccctccagcccacctccagtcctccccgcccccgcccgcccccactgtccccaaggccgccctggcccctctccgcacgcactgcgagagcgccgagacgtggttgagcgcgtaggacaccgggagggcgctcagcgacagcgccgcgatcttgccggccagcggcgggatgtccatagcggcggctgctggaccccggctcagccccgacgcgttctccagggcgctcggctcctcgttggcggcgagtccgggccgaggctgccagggacccgccccgcacaaaggtcgaccccgctgcgccctgggcaggccgccgtgaccgccctgcgtgttcccagggagcctccaaggcccctccccggccctccccctggcagctgccccgccccttcgcccctcaccatcgacaccctcgtctccaatggccgtcccgctactcagcctcagtttccctcactgtcaaaggctgggacacaacacctcgggatgcttctgctcttaggccaaggggtgcgccctggaggtcctggcgtgccccctctttcccctgcctccacaacttcgttctaaggaaattttctcctggactctgcgcttctaaacctctgcattccccagagtttcccatccccacccaaagatcaagtcggcattccctgtgcgcacggatggagcaacctccagctcttgggtgcaaaatgcctttcagtgggcttagatttgagttttcataaggtggccacaaatgtaaacgtgtttccaggcaggtgtgaagtttttttgtttgttttttgagaggtctcactctgtggcccagactggagtgcagtggccctcctccttgaactcccagcctcaagagatcctcctacctcagcctcccaagtagttgggactacaggtatgcaccaccacgcgcagctagttattttttgtaaagacagaggtctcacttttttgcccagactggtttcaaactcctgggctcaacagatcctcccacatcagcctcccgaggagctgggattacaggcgtgagccactgcgaggggtctttaagtgtgaggctttgactccggggctgtccctttgcaggctagtcccgggtttagggttcttcatttcggggagagggtagaaggggtcctagcgggtgggggctgaagttagaatatcgggatggagccagtttggtgaagagtttgggaacggtgttcctggcagggaggaaagtggctcaggcttggaactgagcagtggaaaggaggtcggttctgctggggtgtgatgagaagcgagacagctgtgagaggctgtgggaggttttgaacagctgggagggggccacagtattgggggggagaataaggagaccatctgtctttgtcaccccctccaaccagactctggcccatgtggagtacttgtggatgctgcagacagcaaggtgaaccatgcccacctgacgcctgccctgcgggaccccagtctgcagctggcacaaattctaaccactgcccctacctcaggccccattctgcacgcagccccttagcttgatgccaactgggtcacaggtcttcctgaactgggccacaagagggtcttctggccgcaggtctgactcagcctccttccccaggtgtccactgcccatgggtgaagttcaggttcccctggactttccccaactctagcagggtcaacaccccccaggcctgctttctgtctgtaaaatgagccttcttgtaagcgggccccagcatcccctcctccaggcagccctgcctgccacccccaccccaccttctccacacaaggccagggtgcctgtgcccagctcagcctaggggcttggccttgtcccgtgtacaggatgcacctgcacacgcacacagcacttggaggcctcgtcccctggcaaggggtaaagtccatgccctgagcctggtgagcctccaggttgctgagaactgagaagtgacttggatggctgaatgcctgggacccagtgccaggattccctgaaccactggctgcagagaactaccccgctgtgctcagggtcctggcccactgccttctgggcagccctcattcatgggcacccaggccaagcccaccaatgttactctttgctctgcctcagccacagcgtcaggaaagaacaaagggtggtatatcaccccagccttggctctgccactgcatctggcacctccctggtctcagaccccactgagacactctgcagaccgccccaccacggctccctggttcctctcagtagcagcctcagacctcatccccagcagcctggctgactggagtagatcttgtccacctggtccccacacttggcacctagtgtttgctgaatggctgtgtgaacacaagctggcccaggagcccgactccatgccaagcatgtgaatagggagcccctggtgcctgcaggggctgggcagcacccactgggtgtgtgtggagggggtgggggcagatggaaatgcaaattcccagggccctgcccaaccagctgactcggcagctgcagcttaacaagatccccagggtgacttaggcacaaatgtggggctctggccctggggcagatgtgggggtcttggcacacactgtggcctgggctaccctcctgcctcaaaacctccggctctgaggcccttccttctaggagctgcctgacatgttggcatggcacatccatgcatccatgcggctgtcccctaacgacacaagccccagggactcgtgtgcctaccacactggtgggacctgaagggccacagccaacacctgtgtgctgggccgtgccagcaccacctgccaggagagcacatgggtgtgcccagaagccacctgcccccacaggtctgagggaaggtggggccctgcctggagacccctccccaacctccctctgcagcacagtgctaggctcggaggttcctgacattcctttagcccaggtgtggccaagtctccagctttattattattattattatttgagacagagtcttgctctcttgcccaggctggagtgcaaaggcgcaatcttggctcactgcaaccgcttcccaggttcaagccattctcctgcctctgcctcccgagtagctgagacgacaggtgtgcaccaccatgcccagctaattttatatttttagtagagacaggatttcaccatgttggccaggctggtcttaaactcctgacctccagtgatccgcccgccttggcctctcaaagtgctgggatgacaggggtgagacactgcacctggccttccagctttactatgctgaaaacaactttcttcctcccctccagtgcaacccaggctgagcggggatggagactccacaggccaataaggagagccccgagacagcatcttgcatcccgctgctaacaggaggggcttcctgcaacaggaccaggcatctgtggtggatgagcactgggactttattacacggcacggcactcgtgacaacggaaggggtgggcagaaatgcaggccggaacattccacagtccagggacggttggtcattcagaaagtatgtatttccagaacactcagtagtaaggccgtctgggattgttctgtggaaggcaaaacagataacaggaggaggggattagcactaaagacagcagttcctcctgtctggaaccttccggaggcagctgagcccgcacccttgaggtggcagggcaggcttgggggacgggtgggggcttgaatgcaggtgggtggtagggggctcgctggtgagacccagcctggctggactgaggaaggaagggagccttctgttcctaccaccaccctctcctgtcgactgagcaaaggcagcccaggaggacatgcgtaccagggggttgggccggaagcggtaggccagcatcatcctcttgcggaacgcctcatactcgtcgtcctccttggagagctccgccggccggtcaatgccgaagccagcgccgtccactgtggtggtgcccctacagggagaagaggatgtgagcagggacctggggccagaactctggccggggggccgggcacagctgggctctcaacagcacctcccgcgggtgcagggctgggctgggacatatctgcacagagagaagcttgaacctgaatggtcaaggaggggagacccccggggcgggcggggggggggggcctaggccccagggtcccacacaggaaggaggagcccacagtgcaagttgtcgcagctcttgggatggcaggatggttactcaaggacagccttgaagggggcactcggggccagggtcacacctgggagagctcctgcccatctctgggagtggtttcgcactcatggggaattcaaataaggcccttcacaaggcagacaaggcctgacccatctgtaccctcacccaccccatctggcctggagatactcatgaggggacggaaggaggccctgggactggggaggacccagcccgtatggcctcctgcactgcaggcctgtgcctgacaaggggtgtgcagtggggtgctgtgatcattttgccacaagggaaaagcgatgacataaaggggtgggaatggggaggcggcaggggacccacagaccccaagttcatggccatgccctcccacaaggccacactcacttgttcactgggttcttgatgccctggccctctgagcccagcccctcgccctccttccagcccatcttcatcagcatctggtagccgatgttctccacagtcagcttgaactccttgtactctgagtagtcaggctcacggccctcctgcaaggtgaggaggtagctgtcacccaccagggctggggctgtggtggcccccaaatccaaccttctgcctttggtttcaatcagtgctgggaccagtggcccatctgcctccctctcaccagatcagactccttgagaacaaacagaccaagctcctcctgcttctcagggtccccggggccttagtgccaaactgtgcacccctggtggccaagtcaaaagggcaagaggatgagttacacaggccttatccacctgagataaagcaatggttcactggcaaagagaagccccgtgttcatgtcctgagagcaatttgttgtacaaggtactaataagagatggacaacgaggttaccacctcactaatgaggttatcaggccctgaacagttttataaaaaaacctcaaaaagataatgggggacgtgccatgtcagccctctctcctcaggagcccaacagcagcagaggcagaatgttaaactctggttctggagaggccagtccgtggggacttctgccggagaaacactttgcctgtaaactgcacttaattggctccactggaagcaaaatttcccccgcagccccaggaaatgtttctgaggcagcagctgagctgctgtttgctaattccctacacagacggcgcctgtcattaacagatgcctcctgcagcgaaaaggcctggctcctgctgtgatcgagagggtagccaggctactttgggcacctgcagggtgaggcagctacaggaggggctggcatgtggcagaggctggagctagggcccctcctggctcaccttcagggccttgaaggtctccataaacttttccagctcgtctggaggcaggaagtctccgatgaagtgcttgccccggcccatctttgtcagctgctcggcccattctgctcagagaagcagaaaggtgagaagagggagaagcaggaaggaggggagcaggcctggtggctcccagggcacaggtatgaggctcagtgggagcctggggcccccagggaaggaggcggctaggccatgaccccagcccgagcctctgcctggtgaggcagcccagcatttagtgaaccctgtgcagctctccaccctcacgatgtcaggactgctccttttcaccacggagaaaactaggccccagagagactgagcctctcactccaggcctcacagccacaggaagcaggctgggggctaaaccaggatggcagctcaagaccacgtgtggcgcatccaggtaaccttccagggcaggtgaggggggccatgcccagcccagcccggcccaccccgctgccccacatacccctggtcttatccatctccatgcgccgcagctggtgctcccaggtgcccagctcgctgtccacctcctcatcactgtcatagccgtgctggtgctgttggactgccttctcccacagcagctgcatgtcctgcatggcccgcttgtgctgcatgatcatgtcgtacatctgctgcatctgcagggcacactcgccagtgagccagggcacggtgctgtggcctgccggagccccgctcctgctccccgcctccagtgctgggcatcccccgccggaacgtggctcatctggacccctgggcaggactggagcaaggactctagcaagtactgagtactgccctgggttctctaaatcccagtgtggagcacggaggacctcttggccactgaatgagggtgactcagggtcctgacccctgggagggtcaagggtgatgtgacggggctgcgggcctggaggaggggtcacagcgagctgaccccagggactgacaggcaagcgcctgcagctcctcaggggagccaacaccgacactgcccaactacaactgggaggcctcaagtccctcagggtgccctgtgctgaccaggatggtcctgcactagacacgacagaggactgcggacaaagaacatcaacgtagactctcccatgggaaccagccctggagcgcggcgagaagcagccacaaagctcaggccaggatcacagaccaccggggccgccccaagggccagtggtctcccaggcaggctgagaggccactcaggtgcagtggggggtggcatgccacctactggggcagggggacctgcctgcctggaagcctccccgctggccatgggttccacctgaacacaggagcttggcgaagcacatgaacccctgtgaccgctgcacccgggggtagaggacaacactctatgggcgccgaccatgtccccgtccccttgtccccgcagtcttacctcctgctgctccttcagctgcttcttctgggcgtctgaaagctctgtgacgcccactagacccacaggcttccccttctcatagccgagccccttgaggtcctgaactggaaaccaaagacacagggtagtcagagcctgacaggtgcaccccgatctcgctcctgcgctggggtgtgctgtgagtctcacaccttcatgacactccaggcacacggggacctcatatcattactgtcagtgccacgtggtacgtgacggcctcggggtcccgctgtgtgctgccacgtgcacccccgcatcttacgtccttgtgacctctccagccaggctctacgcaccaccacattgcagatgtggacaccaagaatcagaggttccgggactcactcagggtcacacagctaacgagtgacagggcaggaatttgcagagccagagacaagagagctgagacggcatgtgggcagcatgcatgggcgcacgcacaaacgggctctcagaaggcagctccgttgctaacagacaccaggtgtaagcgcgcacagattcagagtctggcgtaagactcagctgtgcgactcccttagctccttcaggggaggcagccaaccatcctcagagcagctgacatttaatttggcatcagctgtggaacttggcaggctccagtaacactgacacatagaaagatgctgcaacagccccatccgggtggcagaaaccaccacccctcgggcggtgcggtgcttcccgggggagaaggtgagcaaaggggtgcagcgggccctctgggaagggaaaagatttgggtccttccagctcatcaacactcgggctttgccgctaagaatggcccacatttgcactcttagtccttccttggtttacagggcactgagggatgtgggggagccctgttggggagacgcaggagccgaagtctgagcatctggttgattgccttagagcatgcccacagtccctttcccccaggcccactccaccacatgagcgggcgggtgagggctgccatgctccctgaggacatggatcagtgggacttgaacctgggcctcagactttggagcctgttctgtccaactaagccacagggcgacttcttcacctgctgggtgtctcagagctggggtgtgtgcgcattgaagcacccggatctaagcactagggttcggcacttgagtgacaaaccaatcctaggtaccctccaccctggctgcagttgctggctacagccctggtaagcataagaatcttcattcagtagcttttctccttgacctagaatctctgaggcccttggggccagggaggcaccgagaaagcaatcatccctgaattggacgagcaggtccaagaggctggccacccgacctgggaaggctgtcgccttcccttttggggtcctgtcctcatcttgcaaacacaggtgatggcgccacacaacagggcacgtcggactcctccatgcacctgtgtgttgagcgccagtgaaggtggagtgagggggtgatgtttctgctccacagtgcaggctgcatagctgcatagtggggcaccatatgacatgagatagtgggtgtcagtcactgattatcatctgcagaatgcaatgacaagagaccaccccccaacccttgtaggtttggtaagaaaatgagagaccaggccataggctggccctccccgaaattgctgctaagaagggagaggtgaaaaggtgattgtgtaaaactgtggtaattattgtgcttatcgttgtctgtctcttgaactttctttcatttttcccgagatggagtcttgctctgtcgctcaggctggagtgcagtggtgcgatcttggctcactgcaacctccgcctcccaggatcaagcaattctcctgcctcagcctcccaagtagctgggactacaggcacgtggcaccacatccagctaatttttgtatttttagtagagacggagtttcaccatattagtcaggctggtcttgaactcctgacctcaggcgatctgcccaccttggcctcccaaagtgctgggattacaggcgtgagccaccacacccagcctcctgaactttctgtgacaagaaagaatccaagtactggccgggagtggtggctcatgcctgtaatcccagcactttgggagactgaggtgggaggatagcttgagcccaggagtttgagactagcctaggcaacatagtaagaccccatctctatttatgttaaaaaaaaaaaaaaagagactcaattcagacccaaagacacaaatacagtcaggaatcacttcatggaggggaccattctggaaatgcatcattaggcgccgttaccaatgtgtgagcatcacagactgtacctccacaaacctagatgctaccgcctactgcacacctacactagatattacagttgaccttgaactacatgggtatgaactatacaggtccacttaatatgctgatttctttcaatgaatatattgaaaaaatttttggagatttgcaacaattcgaaaaaagtcagatgaaccacgtagcctagaaatactgaaaaaaaaatcaagaaaaagttaggtgtggccaggcacggcggctcacgcctgtaatcccagaactttgggaggccaaggtgggcggatcacaaggtcagaagatcgagaccatcctggctaacacggtgaaaccccgtctctactaaaaatacaaaaaattagccaggcgtggtggcaggcgcctgtcgtcccagctacttgggaggctgaagtaggagaatggtgtgaacccgggaggtggagattgcagtgagccaagatcgtgctactacactccagcctgggcgacagagtgagactccatctcaaaaaaaaaaaaaagttaggagtgtcaatgaatgtataagatatatgtagatgctagtctgttttatcacttactaccataaaacatatacacattgcagaaagttaaactttatcaaaacttatgcacacagactgtacataatgtgttttgcagtcaagagaaatgtaaacaaatgtaaagatggtagatgaaatctttttttttggatatggagtcttgctctgtcacccacgctggagtgtaatggtgcaatctcggctcactgcaacctccgcctccacctcccgggttcaaacaaattctcctgcctcagcctcccgagtagttgggactacaggcacctgccaccatgcccagctagtttttttttttccttcttttttttctgtttttgagacagagtctcactctgtcatccaggctggaatgcagtggtacgacttcggctcactgcaacctccgcctcctgggttcaagagattctcctgcctcagcctcccgagtagccgggactacaggtggcacgccaccacacccagctaatttttgtatttttagtagagacaggtttcagcatactggccaggctggtctcaaactcctgacttcattgatccgcccgcctcggcctcccaaagtgttgggattacaggcgtgagccaccacgtccggccaattttgtatttttagtagagacagggtttcaccatattggccaggctggtctcgaactccaaccttgtgatctgcccgccttggcctcccaaagtgctgggattacaggcgtgagccactgcacctagcagattaaatcttaactgcataacattagctgtagtgcacacggtactactgtaatcattttgtagcctcctgttgctattgtaatgagctcaagtgttgagaatatctgcttaaaacaccacatgacactgatcatctctgcacaagctgtttgtccctttagcaaattgcatattgcggtaaagagacatctctcagggttctcaagtatttttcaggtttagtgcaatatagtaaaccttgaataacatcatgggtcccataaaaattgccactagtcaagtgactgtagtcccagctactcgggaggctgaggcaggagaatcgcttgaaccccagaaatggaggttgcagtcagcctagagtgtgccattgcactccaacctgggcaacagagcaagactccatctcaaaaaaaagtgccactagtgatggcggaagtgctcccaagaagcagagaaaagtcaagacattacaagaaaaagctgaattgtttgatatgtgccatagattgaggtctgcaactgcagttgcccactatttcaagataaatgaatccagcataaggaccactgttaaaaaaaaaaaaagaagaagagaaattcacgaagctgttattgcagctatgtcaacaggtgtgaaaaccttgcactttctgtgaagtaactttttatctcactttgaaaatgcagtttttatgtgtataggactgctatcagaatgacacacctacaaggtttaatatgatttaagaaaaaagcaaagtcactatatgacaatttagaacaaaagcaaggcgaaggagcgaaagctggagaatataatggcagcaaaggatggtttgacaggtttagaaagaggtttggctttaagaagatgtcaggataacaggaacaacagcttctgcccacctagaggtggcagatgagttcccagatgccattaagaaaatcattgagaaggaaagatatgcatgtgctcaaacaggtttgtttttttttttttttttagatggagtctcgctctttcgcccaggccggactgcagtggtgtgatctcggctcactgctgcctcccgggttcatgccattctcctgcctcagcctcccgagtagctgggactacaggcgcccgccaccgtgcctggctaattttttgtatttttagtagagacggggtttcaccgtgttagccaggatggtctcgatctcctgacctcgtgatccgcccgcctcggcctcccaaagtgctgggattacaggcgtgagctaccgtgcccagcctcaaacaggtttattttgaaatggagtcttgctctgtcacccaggatggagtgcagtggagcaatcgtggctcactgcaacctccgcctcctgggttcaagcgattctcctgcctcagcctcccaagtatctgggattacaggagcctgccactacacacagctaattttttgtatttttagtagagatggggtttcaccatgttggccaggctggtttcaaactcctgacctcaagtgatccacccacactggcctcccaaagtgctaggatcacaggcatgagccactgtacccggcctcaaataggttttttaatgcagacataagtgccctattggggtgggggagccaaaaaagacattagtaaggaagaggagcaaacaccagaattcatttatttatttctgtttgcttggacacaggttctcacttttttgtccaggctggagtgcaatggcgtgaacatggctcactgcagcctcaatctcccaggctcaagtgaacctctcacctcagccttccaagtagctgggactacaagtgaacaccaccacacccggctaatttttgtggttttttgtagagacagggttttctcatgttgcccaggctggtctcaattcaggcctcaagcgatccgcccacctcggcctcccaaagcactgggattacaggcatgagctaccgtacccggccaagcaccagaacttaaggcaggataacgctactgttttgtgcaaatgcagttgggtttatgatcggggctgcccttatctatgaagctgctaacccctgagtcttaaagggaaaagataaacaccagctgcccgtcttctggttatacaacaagaaggccagggcaggacagccatggtggctcacgcctgtaatcctaacactttgagaggccaaggcaggaggtaaaaatgcctggacaacaaaaattctttttctagattggtttgctcctgaaatcaggaagtaccttgctagtgactgcttgttaaagttcttttgatattggacaatgcccctggccacccagaacttcatgagtttaacactgaaggcatcaaagtggtctactgcatccaaacaaggtctctacttcagcctctagattggggggtcgtaaaaaccctcaaggctcataacacacgtactctatggagaggattatcaaagctacggaagagaacctcagcagagcgaacattatgaaagtctggaagggttacactacaggaaaggccatcaagcctgaaacaataaattcctgctagagaaaactgtcttcagatgtgcatgacttcatgggatttataacagagtccatgaaggaaatcgtgaaagagattgtagagacagcaaaaacgggtagagggtaagggatttcaaaagatagatcttggagaaatttaagaactaaaaagctggacatgggtggctcatgtctgtggtcccaactgcttgggaggctgaggcggggagatcacttgagaccaggagtttgagtccagcccgggcaacataacaaatctcttgtctctataaaaaaataaaaattaaataaaaatttaaaaaaataggtctggccaggcgcagcgggtcatgcctacaatcccagcacttcggaagcccgaggcaggtggatcacctgaggtcaagagttcgagagcagcctggctaacatggcgaaaccacatgtctactaaaaatacaaaactagctggccgtggtggcacatgcctgggtgacagtgcgagactctgtctccaaaaaaaaaagcaaaacaacaacaacaacaacaacaacaacaaaataggccgggcaaagtggctcacgcctgtaatcccagtactttggaaggctgaggcagatggatcatttgaggtcaggagtaagagaccagcctgagcaacatggtgaaaccctgtctctaccaaatacaaaaattagctaggcatgggcacacacttgtaatccaagctgctcggaagactgagacgggaggatcccttgaccccagagcgcagaggctgcagtgagccgagatcgtgccaattcactccagcctgggtgacagagtgataccgtgtctcaaaacataggtgaggcgaggtggctcacacctgtaatcccagcatattgggaagctgaggtgggcggatcacttgaagtcaggagtttgagatcagcgtgggcaacatggtgaaaccctatctctacaaaaaatacaaaaaattagccgggcatggtggtgcatgcctgtaatcccagctactcgggaggctgaggcatgagaatcgtttgaaccagaggggcagaggctgcagtgagctgagattgtgccgctggactctagcctgggcaacacacaaacactccaaatcgaaaaataattaattaattaaaaatagaagagctaacagataccacactggagaaattaacagaagacagctggatggaaaggagtgcttccaaatgagtgccagatgatgaggaagaagccggagaagcggcagcagcaccagaaaagaaaatgacaatctggtaggaggattctcattattcgagactgtttctgacttcttttatgacatggacccgagacatgggcactggaactaagtgtaaatggtagaagaaggaataatactgtatataaacatttttagggaaatgaaaaagaagtcaggcagaaattgtgagatattcccataaagttacagagtgcctgtctctccttccacctcttcggcagcaagaccaacccctactcttcttcctccttagctgttcaacacgacactgatgaagatgacctttgtgatgatccatgtccgcttcataaatagtcaatatattttctcttcctcccttctttttttttaaaagaggcagggtctcgggaggcagaggttacagtgagccgagatcatgccattgcactacagcctgggcaatagagtgaaactgtctcaaaaataaagaggcagggtctgtctggttgctctgtttggaccctctgtcatctaggctggagtgcagtgccacgatcatagctcactgcagcctcaaattcctggactcgtgttcctcctgcctctcagcctcttgagtagctagagctatagatgcacaccacacagcctggctaatttttcctatgattttcttagtaatattttctttcttctagcttattttattataagaatatagtacataatacatataacatataaaaagcatgttaatcaactgtttatgttaccaataaggcttccggtcaacagtaggctattagtagttaagtttttggggagtcaaaagttacatgtagaggctgaggtgggcagaccacttgagctcagttttgaaaccagcctgggcaatgtggtgaaaccctgtctctacaaaaaattaaagaattagccaggcgtgctggtacagggctatagtcccaagctacttgggagcctaaggtggaaggatagcttgagctcaagaggttgaggctgcagtgagctgtgattataccactgcactccagcctgggaaacagagtgagaccctgcctcaaaaaaaaagtttatattcagattttctctttttttttctttttttgtgagacggagtcttgctctgttacctgggctggagtgcagtggcgcgatctcagctcactgcaacctccacctcccgagttcaagcgattctcctgcctcagcctcctgagtagctgggattacaggcatgtgccaccatgcccggctaatttttgtatttttagtagagacagagtttcaccatgttggtcaggctggtctcggactcctgaccttgtgatctgtccacctcagccttccaaagtgctgggattacaggtgtgagccaccaaacccggcctatattcagattttcaactgcacagggcttggtgtcccaacccccatgttgttcaagggacagctgtataccccgttgctcccaggctacaaacctgtaaagtaacacagtaagtatttatgtatctaaacataaaaaaggtacagtaaaaatactgtactataatcttataacaattttaataatgaccactgtcatatatgcagtccatcactgaccaaaatggtgtcatacagggccgggcatggtggctcacacctgtaatcccagcactttgggaggccgaggcggggagattacttgaggtcaggagtttgagaccagcctagcctgcatggtgaaatcccatttctactaaaaatacaaaaattagctgggcgtgggctgggcatggtggctcacgcctgtaatcctagcactttgggaggctgaggcaggtggatcatctgaggtcaggagttcaagatcagtctggccaacttggtgaaacctcgtctctactaaaaccaaaaaaattagcagggtgtggttgcaggcgcctgtagtcccagctactcgggagactgaggcaggaggatcgcttgaacctgggaggtagaggttgcaatgagccgagatagtgccacagcactccagcctgggcgacagagggagactctgcctcaaaaaaaacaaaaaacaaaaaacaataacaaaaacaaaaaagaatgaatgaagaaagaggttccggacagcagaactcatggaggttcctggagggtggcgtgcccagggagggcatggaagctccacgccccttcccccatacgtcgccctatgtgactcttcatctgaaaaaatccctcaagtcaagaatacaaggaactaagagggagttaggaagaatataagggccatgtactcggcccccaacccctaatctcggtgggtgtgggtgataggaaatttatgtctggagatctaagagcaacatgaacttctgctctgcttctcttctagaattttaagaaggtggtagactggcagatgtgacccgccatcacacaagaagaatggaagagatggtggcacactgagactagttggagacccctaggaaattacccttcagtttcctgtggctcccaagtgatggaggaaggctgaaagttcttgcgggcaaggagagagggaaggagcagaaactggttatggtacataaatctatacaaggagaactgagtgtgcttgtgttattatttttaatgtttagataatcaatgtacaaacattcttgctaagtcaggcacggtggctcacacctgtaatcccagcacttgggaggcggaagcaagtggatcatctgaggccaggagtgcgagaccagcctggccaacgtggcaaaaccccgtctctactaaaaatataaaaattagccgggcatggtggtgggcacctataatcccagctactcgggaggctgaggcaggagaatcacttgaacctggtaggcagaggttgcagtaagccaagattgtgccactgcactccagcccggataaaagagcaagactctgtctcaaagggaaaaaacaaaaaacaaaaaaaactctttgctatatatacacagttttgttatttttatttttaaggaaaactgtatttctgaaagtagggtttgaagagaagtttattatagattactgacaaagctaatctatcagttaatatatataacaatcatttatttatttatttatttttaaaagaaagaggctgggtgtggtggctcacgccagtaatcccagcactttgggaggctgaggtgggcggatcacaaggtcaggagctcgagaccagcctggccaacatggtgaaaccccgtctctactaaaaatacaaaaattagctgggcgtgggggcgcccacctgtaatcccagctactcgggaggctggggcaggagaattgcttgaacccgggaggtagaggttgcagtgagacaagatcatgccactgcactccagcctgggtgacagagtgagactccatctcaaaaacaaacaaacaaaaaaataagaaagaaagaagatctaaaaccaataacctaagcgtacaccttagtgagctagaaaaagaagatcaaactaaatccaaagctaacagaagaaaatagtaaagtttagagtggagataagaaaatgaggactataaatacaatggagaaaaatctatgaaaccacaagttggttctttgaaaagatcaacaaaagtgacaaaccttttagttaaactaagaaaaaaatgagagaagactcaattactaaaatcagaaatgaaggaggggctgtaactaacgactgaaaataagacataagttaaaaggaccataagaaaatacaataaactgtgccccaacaaattagatagatgaagtgaacaaattcctagaaacacaaaccatcaaaacacaagaagaaatagaaaatctgaatagacaagtaaatcaggattcgaaaaaaccttccaacaaaaaaaggccaagaggctgggcacggtggctcacacctgtaatcccagcaatttgggaggccgaagcgggtggatcacgaggtcaggagttcaagaccatcctggctaacacagtgaaaccccgtctctactaaaaaaaaaatacaaaaaattagccaggcttggtggcggcgcctgtagtcctagctactcaggaggctgaggcagaagaatggcgtgaacctgggaggcggagcttgcagtgagccgagatcacgccactgcactccagcctgggtgacagagtgagactctgtcacacacacacacacacacacacacacacacacacacacacacaaaagggccaagaattagatagcttcactggtaaagcaaacatttaaaagaagaaataagccgcgtgcagtgattcatgcctgtaatcccagtgctttgggaggctgaggtgggcagatcacttgaggtcaagcattcaagaccagcctggccaacatggcaaaaccccatctctactaataatacaaaaattagccaggtatggtggcaggtgcctgtaatcccagctactcgggaggctgacgtaggagaattgcttgaacctgggaggtggaggttgcagggagccgagattgcacgactgcactccagccagggtgacagagtgagactccgtctcaaaaaaaaaaaaaaaaaagaaagaataccaattctcctcaaactcttccaaaaacacaaaagagagaacatttctaaacttactctatggggctaggattagcctgatacccaaggcagacaaagatactacaaagaaagaaaaataggccaggtgtggtggctcacgcctgtaatcccagaactttaggaggccaacatgggcagatcacttgaggccaggagttcaagaccagcctggccaacatggtgaaaccctgtctctactaaaaatacaaaaattagccgggtgtggtggtggaagaattgcttgaacccaggaggtggagattgcagtaagctgagatcgcgctactgcactccagcctgggcaacaaagagcaaaactccatttcaaaaaaaaagaaaaagaaagaaagaaaaatacaattgaatattcctatgaatacagatggagaaatcctcaataaaatactaggaaaccaaattcagcagcttatgaaaggattatacaccatgaccaagtgggatttatccccgcaatgcaaggatggctcaacatttgaaaatcaatccatgtaatacaccaaattaatagaatgaaggaaagtaaccacacgatgattttatgtatttatttactttttttttttgagactcagtctcactctgttgcccaggctggagtgcagttgctcaatctcggctcactgcaacctctgcctcccaggttcaagagattctcctgcttcagcctcccaagtagctgggattacaggcgtgtgccaccacacccagctaatttttgaattttttttggtagagacggggtttcaccatgttggccaggctggtcttgaattcccggcctcaagtaatctgcccacctcagtctcccaaagtgctgggattacaggcgtgagtcaccgtgcctggcctgttttaactgatgcagaaaaagcatctgacaaaaactaaaacattttcatgataaaaacgctcaataaactaggaacagaagtgaacttccagacaggcctggtggctcacgcctgtaatcccagcactttgggaggccaaggcaggcggatcacccgaggtcaggagttcgagaccagcctggccaacatggtgaaaccctgtctctaccaaaaacacaaaaattggccagtcgtggtggtgggcacctgtagtcccaggtactagggaggctgaggcaggagaattgcttgaacccgggaggcagaggttgcagtgagctgagatcacaccactccagcctgcacatcagagaaagactctgtctcaaaaaaaaaaagaacaagaagaagtgaagttcctcaacacaataaagcccatatataaaaaacacatagctaacatcatacacccacacatcatacatttcacagactggtaaaaggctgaaagctttcctcctaagatcagcaacaagacaaggatgcacacttccaccatttccattcaatacggtactagaagtcctagccagaggaattaggcagaaaaagaaataagaagtatccaagttggaaaagaacctgtaaaactatttctgtttgcagataacacaaacttaaatgtggaaaaccctgaagaatccacaaacagaccgggtgcagtagctcatgcctgtaatcccagcactttgggaggccaaggtggcaagattgtttgaggccagcagtttgagaccagcctgggcaacatagtgggacctcatatcgacacaaaaaatgcaaagattagccaggcatggaagagcatgtctgtagtcccagctacttgggagactggggcaggagaatcaattgagcccgggaggtcaaggctgcagtaagctgtcatcatgccacggcactccagcctgcgtgacagagtgagaccctgtctcaaaagaaaaaaaaaaagaataaagttggaaaaattaactcaaaatggaccaaaaaccctgggtgcaatggctcatgcctataattccaacactttgggaggccaaggcaggaggattgcttgaactcacgaattcaagaccagcctgagcaacatggtgaaactccatctctacaaaaagtacaaaagttagccaggtgtgctggcatgcacttgtagtcccacctacttgggaggctgaggtgggaagaccacttgagcttggggaggtcgaggctgcagtgagtagccactgcactccagcctgggtgacagagtgagactcaaaaaaaaaaaaaaaaacccaaaataggctaaagacctaaatttaagaactaaaggtacaaaactctcggtaggaaacacaggggtaaattttcatgcccggatttggcaattgttccttaaaaatgacaccaaaagcataaaccacagaagaaaaaatagatacatttgacttcattaaaattccatttctagggagggctggattacagcaggcactgggagaccgcacaactacctgccccctccctggcactaccatcccctggagggtctgccttcagttcaaaaaaaaaaaactgatactttctggccacattaaaaaaagaaagaaaatttaaaagttgtatgcatcaaaagacgctattactaaagtgaaaagacaacccatagaatgagagaaagtatttgcaaatcacatagctgacgagggggttaatatccagaatctataaaagagaactcgtacaactcaacaacacaaacaaaccaactttaaaatgggaaaaggtggctgggtgcagtggcctgtaaacccaggactctgagaggctgaggcaagaagatggcttgagcccaggagttcgagatcagcctgggtaacatactgagaccttgtttatataataactgggcaaggctgggcctggtggctcacttgaggtcaggagttcaacaccagcctggtcaacatggtgaaatcctgtctctactacaaaaaaaaaaaaaattagctgagcatggtggtgtgtgcctgtagtcccagatactcaggaggctaaggcaggagaattcgcttgaacctgggaggtgggccgggagcggtggttcacgcctataatcccagcactttgggaggctaaggcaggcggatcatgaggtcaggagatcgagatcatcctggctaacatggtgaaaccccctctctactaaaaatacaaaaattttgccaggcgtggtggcacacgcctgtagtcccagctacttgggaggctgaggcaggagaatcacttgaacctcggaggcagaggttgcagtgagctgagactgtgccacactgtactccagcctgggcaacacagtgagactccttctcaaaaaaaaaaaaaaaaaaaaaaaagaacccgacggcagaggttgcagtgagctgagatcgtgccacttgcactgcagcctgggcaacagagcgaaactctgtctcaaaacaaacaaaaactgggcatggtggggcaagtctgtggtctcagctactcaggaggctgaggtaggaggattccttaagccagggtggtagaggtttcagtgagctatgattgtgccagtgtactcgaacatgggtgacagagacctcatgtcaaaaacataaaacgtggggaaaaaaggactaaaatagacatttctccaaagaagctatacacatggtcaataagcatatgaaaataagctcaacagcactggtcattagggaaatgccaacccagacgacgagatatcacttcatacctcttaggatggttataataaaaagatgagagtatgactcttgcctataatcccggcactttgggaggccgaggcaggaggatcacttgaggacagaagttcaagaccagcctcagcaacatagtgagaccccgtctccataaaactttttttattttaaaaaaaggtgaggatacagaaaaagtggaacccttgtgcactgctggtgggaatgtaaaatggtgcacctgcaggttcctcaaagttaaaaggagaattacaggccagacgtggtggctcatacctgtaatcacagcactttgggaggctgaggcgggtggatcatctgaggtcaggagttcgaaaccagcctggccaacatggtgaaaccccatctctacgtcccagcactttgggaggccgaagcgggagatcacgaggtcaggagatagagaccatcctggctaacacagtaaaaccccatctctattaaaaaatacaaaaaattaggcgggcatggtggcgggcacctgtagtcccagctactcaggaggctgaggcaggagaatggtgtgaacccaggaggcagagcttatggtgagctgaaatcgcaccactgcactccagcctgggcaacagagcgagactctgtctcaaaaaaaaaaagaaaaaagaaaaaagaaaaaaaaggcagaattgcaataggcccagcaattccacacctaggtataccgacaagagaactgaaaacgattcagatagtcacagcagtattattcacaacagccaagcagtgtaaacaacctctgtgaatataagagttcattcacagatgagtgggtaagccaaatgtggtatgtacacacagtggaagatatggccacagaaggaatgaaattctgatacaagctacactgtggatgaaccttgaagacattatgctcagtgaaagaagtcagacccttccaacacagggagggggagagggtctgcccacctgacagaggcgagggagaggcatccacgtccctctgcaccagttcagcaggtgggagctctaccttatcctcttcaggcccccaccggctcttccgcttcctcttcacggtggctgcggaggctggcttcccgggggcagctggagcagggatgatagtgggcgcaggcgtggacgaggcggggcaggtggtggctgggggtaaggaccctgacagggcctcaggaggggacttgcgcttcaggccgggatcaggtgctgtgaagctgcctgtggagctggccttggctttccggaactcctccagcttctgtcggtagtacttgtacccttggctattgggctcatacagaaagctgcaaaggagagttggggggtgcagtgtcagctgggcccgaggccctgtccctgattctgggcaggagcagttctggccttgtgtgcccacgttggccagggtcactatatggtcatgtcatagtcacggtctccaccatgacctcctgccctgccaggcctcctggcagtgactgctggttctggtggcccgatgcccttcctttgaactgagtcactccaatcctcaccctgtctttatcaggcacccatcacactgtcattgttcaccctgctacaaagggaaagggcagggaccctcagacccttccccagggcctgggaaaagtgagacattcacaccaaaaaatctcagattgtggggagacaccagacacgagacagggcagagggacttgtcttgatcccaagggcttctcaaatgcatctttgagacaatgaacatcagaacggaccaaggagctgatttctaccccacgtgggggcaggcagcctcagggaagtgtggcttccagtgaggctgggagcacaggtcttctctgtccctacccagcctgaggagcacagcaggtggcgctgggttcagagccatgttccgcacctactggcgcctctcggaccgtacacatccccagtccacaggactgtctttggggtctatgccaaaagggagagtcttggcccagctccacatggcagaacacgggagagaactgaatgcatgtacagccctgaaagcatgttacagtgctgaacaagatggggctggacctgcacttgtgaatctggagggatggtcatagcaccaaggcgtgcaactaatgtgaattaaagggtcaaggatgctgtgaagtccctttgtgttacagaggccgggcgcggtggctcacgcctgtaatcccagctctttgggaggccgaggcgggcagatcacctgaggtcaggagttcgagaccagcctggccgacatggtgaaatcccgtctgtactaaaaataaaaaaattagctgggcgtggtggtacacgcctgtagtcccaactgctcgggaggctgaggcaggacaatcacgcgaacctgggaggcggaggttgcagtgagccaagactgggccactgcactccagcctggaccagagtgagactccatctcaaaaaaataagataaatagtgagcgagcagcaagagaccccttagacagtttctaggtgagcctgtgtgtctacggccctgctaacatccggtacctcaagagggtgggacagaaggacaggagatgacagcatcttctctgtaatcctgggtcatggtacacgtgtgacccagtgaggaacatatgcaaagattaagaggtaaaagcaacaactgttcaggagagaagggaacagttggtcagatttggaaaagacacttgacagccgggtgagttcagacatggatttgagaggccaagctggggaggctcacttgctagggcgagcaggcatcggggtgtgggggccccttcctggtctcagctggtgcttcaccctgagtgtcctccaggatggtccaaggatgcatcacagtcccctggagggtctgcccatctcggggagggggttacaatggcactcaatggtagacccccatgagggggagaaagtggagccccccaacaccccatctagaacacggctgggtgcaccaccaaggttcccctctggtggaactaatcccaccctgaacccagggataaccactgttaaggtgtttcctgccagtttcagcaaagatttatcttaatagagctgtgatcctatacatatcccagttttaaaaaaaatttctgcctcaagctgatgacataagcctttcctattagaacagtggaagcatgttcactgactggccttgcttcagttccctcacactgggctgccagctcacatgggtgccttctgaaggcggcatactccactggggagatgtgctgatgatttaacccacagaggttggacgctgactgtgtcactgacttttcttttttttcttcctttttttttctgagacggagtcttgctctgtcgcccaggctggagtgcagtggcacaatctcagctcactgcaagctccgcctcccgggttcaggcaattctcctgcttcagcctcctgactagctgggactacagacgcccgccaccacacccggctaatttttttttttttttgtattttttagtagagacggggtttcactgtgttagccaggatggtctcgatctcctgacctcgtgatccaccccgctcagcctcccaaagtgctgggattacaggcatgagccaccgcacccggcctactgacttttcattacagctgatgctctattgacatgatttccaggatgtatctcagaaatgggagaatgactagtccaagggatgggcgtttccagcttttcattttttttttgttttgtttttcaagatggagtttcactcttgttgcccaggctggagtgcagtggtgcaatcttggctcaccgcaacctccgcctgccgggttcaagccattctcctgcctcagcctcccaagtagctgagattgcaggcatgcgctaattttgtatttttagtagagacggggtttctccacgttggtcaggctgttcttgaactctcgacctcaggtgatccacctgcctcggcctcccaaagtgctgggattacaggtgtgagccaccaagcccagcctcattttttattttttgagatggagtcttgctctgtcacccaggctgaagtgcaatggcatcatctcggctcactgcaacctttgcctcctgggttcaagtgattttcctgccttagcctcccaagtagctgggattataggcacatgacaccatgcccagttaatttctatatttttagtagagatggggtttcgccatgttggccaggctgttctcgaactcctgacctcaggtgatccacttgccttggcctcccaaagtgctgggattacaggcgtgagccaccgcaccaggcctccagcttctttatagccatgcagttggttacaaattgtttcccaaagtggctggggtatgcctggcccacaggcgtgacagggaagggccaggagtggccacatgaggcggctgttagatttgggggtgaggggaggtctgccaaccatgtgggtctaactagcatttctgtgctttggggctgcctcacagctgaccctgcatggagattaaacacaggagcaaacctgcacaccctgcaggggcttgaatacctggtcgtccccccgacccacccagttctttcctggtccggctctggctctgcagtgagtgcggaaatgagctcccttcagcctcgtctcctctggctgcccggggtacccaccccaggcgacctcaaccagcctggcctccccgacagccacacctgacaagctgggcgcctgtcagcaacaccccagaacagaaaggacacacaggagggccggggccacctgcaccaatagcatctctcagttctgacatcaggggtgaggctgggctgcagcggctgggccctggacccctctgaccaagcagagccaccgggctctgggccttggacagaattccatatccttgcctgcttctcctttgaaagggttccacagtcagtgtctacctacaatgacagcaaactaggtttcttatttatatagccttaatcaggcaaatgaaggaaagacatgatgacttggagtggactagtgatccaaccctgaggtgtggtcaacaactcaatgatccccagggccagtctgacattcaggacacctgtcgggggggcctccagtcccaggcagatccatctcctgaactccaggcctaaacaatccacggccccaacacaggctcctggacacacaggtaccagactggggcacacctgaatcccaagcagcccctctccccgtccccattcactgggtcagctgagccttgaccctccctgttcccagcccccatgttccctcagtcccacctcccaatggtggcccactgccctcgtctgcctggacctggcctggccatgtctgcccaccctccacgaccttggccagtgaccacagaagcacagttgccccatctgtgatgaagtctagggctgctgaatcaaccagcccagacagctgctgccccaggactgtcatgtgctgtcacacctcctcactgattgagtcggggcttgtgtaacctggggccaggcgtgtgctcacgggcatgtcaccctcacatcccccaggcacccacccgcctccccgggcacagagcaagtgccaaacccacccaatgaatggatgagccagtgaacacagacccagccactggggctagggtacgaccgcatggccggggatggcagggaggctaggctgcttgtcacacacccacccttctgtggaactcgcacacaggctgggtgttccccctccacagatcctaaagttccccattccctgccatttccctcatcataaaggggagaccctgagaacgtacacaacataaactgaacagtactgtgaatttccacttgagagcctgacttgcccccggccaagggctgctgtgtgtcccaaaggcaactgggcaagtgctagagactttctccatgaggcacctgaaagacacaaaggccccaaaggccccgtgcacctgcctcagagactacccaggggtgctggtgtgtgcgtgggacatgcctgtggggaggcagagctgggctctggggtcagagactcttggacctgccagcttctcacagtgggaccccagcaggtggctggactatgctgatccagtgtcctcccctgcagggggactgtggccagggtgacggtcacctccctggcagggccccccttacctgaatgcctggttctcacggttgttctggagggcaatggtttccacctcgggacccccgtccgctatgaacctggccaacttttctgcaaggttcttgacctcttcgtcctctgggggtgaaactttaagcaggctgtcagtactgggctcaactcaccacacccaacagcctaatttctgctaagaaccccaagggcaacaagtggggtttgttttaggaatgatgcaaagagaaacaggcaaatgggaatcagattactacactgggaccagatgccagaattcataacacacctcaagcccccacccccgacccccgccccgtcccacaagggaggtcaagagggcctgggacatgagccaggacaaaggatccaaatgtgactgcgggtctgggtagggcaggaaggcagatgggagcaccccaggtcacatggttagggggtgctgttgggcctcctctcctggggagaggctcagggcacagggccacagggaacacaaggaacaaacctctgcagcctgcgcttggcctgaacatcaattccaccccaccaacccaccagcacttggctgggattttatgtcattgcagtcaaagaccagccagtatttccccttcccctgaaattcatcccatcagaattgcaccagctgacagtgtctgtcccccaggccctcggccctacactacacttgccttgccctgtcctcagtgcccaggaggaagctggggctcatcaacacttgttaatgtaacaaagaaccaacaagcaaaagccccctctacctagggtactgccctgaaccgctctcccagaagcgacctcgacctccatgagctcccgtctaccccacaatgtggcctgacactcaggcttcaccaggtccttggagcactgagggggaaggtggtgtcagacccattcccagagtgaccccagatgcctgggagaatacaggcctcaaccaccggtgccacacagtgccactccagcacctccaggaaccccgattccgcattggggcacggtatgtccacaggcctccccagaatctcccacccgctccgtccacctacctttctgagaggctgcctgcgacttctgtgcttcctttcttatctcagccaccttcttcctgtagtagaggaattccctgctattcttatcgtgcaaaaatctggagaggaggaagtttgcagaagagaggggaaaataagtatctgtgacaggcatatccctgcagcttctatcgtgcaaaaaaaggcaggctggcgagcagggacccgaaagcaagtctccgtgccacatgggagccacttgtcacttctggtgagaatcagaaaacgcttggaacagcatccggcccacactagcaagcacccagccccacacgtgcgactgtgcagcaaacgcattcaacagcacagccttcccttccccggagatactcacgcaaatgctgggttatccttgtagtcctccatagctactttttctaactcggggcctccttctgccacaaagcgggccaatttctctatcactttccgagtctcggctccctctgggggtgaaactttaaggaggctgtcagtactggggttcaactcacacaccccacagtcaataggcacactctctctatggaccacaacgacagagggggtggggggagaagagtgtgagatgcaggaggctgtcgggcgtcccgagtccaggcacaaaacaccatgacgaggggggagtcggtctcactgtcttggtgagacacactaggtgggagagaagtgtgtgaggctgtggtgagctccaggctggaagctagcagaaaatatatccagcttcccctggttttggtgggggaaatgcttaattcttttctttctttaccagttttcagcataatacatcggttccctttcatccttcaaagatgacacgttcttttttaaaaaataccattatgagctctgatttaaacacactgggtgggtttcgatccatggcaactagtgtcatcatagaagctctgcggccggtggaacctcttcaagctggctcctgagggctctggacatggccccaggagtctctgatggcctccttgccatctgccaggacaggcgctccaagatcatctcatacacttcctgcccagacccagagccagccacttctccaagaagtcggtttccatgagaaactgcatctccagaccagcatctgggagctagggatgctcaatgccacaggcttaatcattatttcggggccttttcagtgaacagagctataaagatatatttttatatacggattagcctccccactgagccatgtggaacttgcttttgcatttttcccttggcctgtttctgaggctgtgagtttgtcagctactacacagactgcagtccttgtaggagatgcacaagagaaatttctcgctgccagcaagtgcctggcaactgggcaacatgccagacctgtggctaatcttattccccttgttgcttgggctgctgggaatgggggagaggtggggagtgtgtagcccaacgagggcccctgtgaggtcccgagagcattccgtgactgtctttcaccctaggtcgccctcctgccatgggcccagcaacaatcctgacctggttgctgtttacaggaacaggtgcgtttctgaggccatgcagacagtgggtcataatgggcttcaagggccccgagatggccaataccccttgtaatgcagcagttcccaacagggtacccttggagctgctggggcacccctttaaggaaaggacacacgccagctccattctaatggcccgggggccaagctggcctctgatccgctcggacacacagccagaagcaagggatctcaaggctgtcatggcacaactccacagtcgcttcagtctgtgctgtcagggtgatgtgacctcaccggctagcccttcacacagttcaggtgtcacagggactcgtcctgaatgtggacagggctggacttgctggcaatgctgtcaccacagccacccccctttgccctcctacactgggcggtctggacaagctcacccgtgaccagtgaccgtcctttcccagggatagaagagagcaccctccaacctgcagctcatacctctggcctaaactcaggggacaggtaacccatggtgaggggcagtgctttggggcctcaagggctcagcggaagagccttagaagctcctcctagaagggatgtgaggatgcccttttggagcaaatgcgagaagggcgtgcgcccctgccttggctgggatgagccgctgtgtgagtggaagatggatcccgctgctcccaagatgaagcccacgcgctgatgcccagcaacaccccagccccgcccctcaccctcctttgctctcctcacctcagagggcctgaggctcagctcagaggtctggtggctgcaactcagccgaaagcacccatgcccctggcagcacttgccctgcccaccacagatcccacctgctagagcacgggcactggtggtgggggagcagcagctcccacaacttacctttgatctccagccactgctcatagtcctcctcctcgtcctcgtcaggggactggaagacactcgggcggtgcgccacgggcagctgcttggcgtgggagtagctcttcacagggcccggcaggctggccagccccaggcctgtccgcctgctgatgagcagggacctcttcccagcgctgggggtgggtgtgctgggaggggcgctgggcgcactggtcggggcgtctggtatagaaggaaggatatgcgcactcgggatctgcagggcacctctcccggcttccgacctaacctaggtgctgtgggccccgggggagctgggtccttgacttccagaactcaggggctcagaggaggccaccctgattttacagatggggacagtgaggcaaagagcaaaaggactcgttgtggtcccccagccagaaaagcagcagcctggggctctgaagtgggccgctgtggctggaggcatctcggtcgcgctgcacccacagactggggacagttctggggacagaacgtcagttctgccgggtaagacccgagtccccgaatcccagtttacaaccattcccttggaggtctgtggccaggctgactggccaggggccagcctactgggtgttctcagcctgacacctgatggggaagggactcaaaccagccttcctcattctaggatgaatttggccttgggttaacttttcttagctgttccctgggaaacctgacagaggtcgaagaccagctgtctcaccagcaacaatgggctctggtcggtaaaccccaaaatcagagacatgggcagaagctccacgggtgacgatttacccacctggcatatcacactgcacacctgtaggcgaccaacctacagacaggggtcccattccttgcacaggcattgctgcccactggagaaggccgggaatcccctggggcactgacaagggggccaggtgaggacctggagaccagccattctagcccacactttggtgtccagaggacctacagtgcagaagcacccacagcaaggcaggggatggggcaaggctggtgtgtgacagcttcaggaagagccctgagtctggtggggagcagcatcatgaaattggccagctcaccaccctgagagcaggactagggcccccggatcatgaaagatgctggctctgcacttggggacctcatctttttttttttagtgacagggtcttgctctatcacccaggctgaagtgcagtggtgcaatcatggttcactgcagcctctacctcctgaactcctgggctcaagcaatcctcccagctcagcctccagagtagctgggactacaggtgcacgacaccatgtctggctaattttatttttattttttgcagagatgggttcttgctaggctgtccaggctggtctcacactcttagattcaagcgatcctcccagctcagcctctcaaagggattacagacatgagccaccatgcctggcaggggcttcatctttttaagccttagcttcctaaatggaaagtgtggaaatggaggtaaccagctgcttacagaactcaatgagatttagttggaccatctagacctaaaaaaaataacgtcgagtaagagaaaaaagcttggaacaaaacgcacactatgtcgtcatctgcataaagggtcaaacatctgaaactacggcacacactgcttgactgagaggacaacaggggttgtcagacacacaatttctcgacagttacttcctgtaagaaagggggatgggaggacttcaacctctggtatttttcttttttttttttctttttgagacttagtctcgctctgttgcccaggctggagtgcagtggcgtgagctcagctcacgtgagcagagctggttgcctcccaggttcgtgcaatcctcccacctcagcctcccaagtagctgggattataggggtgtgccaccatgcccagctaatttttgtatttttagtagagacggggttttaccacattggccaggctggtctcgaactcctgacttgaggaggtccacccgcctcggcctcccaaagtgctggaattacaggcgtgagccactgtgcccagtgagtatttttcatgattaacaaagatcagaagtatcaaaggcaaaatgttacatctatgaattcttttttgttttctttttttgagatggagtcttgctctgtctcctaggctagagtacagtgacgtgatctccactcactgctacctccgcctcccaggcccaaaagtgatccacccatctcagcccccccattagttggggttaaagttatgcatcaccatgcctggctaattatttgtattttttttgtagagaggagacttagccatgttgcccaggctggtcttgaattcccgagctcaagcgatcctgtccccttcggcctcccaaagtgctgagattacaggcataagccaccgcacccagccgacatctatgaattctgagtgaagagaatacgacgtgtgttatcagacgtctaccaaagggaaacagaggtagagagaggtgtccctccagaggattcagtgagagcacagacgtggtctgcttgcacggagcaagggacatggcaggcactgagtccacattccctggcacacggggtggtacccgatgaacactagtgccctggtggtcattgttgggtgcccccagctgcgtgcccacccggcacctcagccgcagcaggccccagaacctattgttctctgatgcagctcaggtgtctcgggccagcccggtgtctctgaaaaccctgtatgcagaagacctgctcacccctgctggtgggttcaagctgacccagcttggggatgcctcccatctcccaaagtggtctcacaagtgtggggaaggcttcatcatggctccacctgccccagactgaaatctgacttatctgtctctgctcctacagggtaagcacattgagtgcagggtctacatttgcccccttggtaattttttttttttttgagacgaagtctcgctcttgtcccccaggctggagtgcaatggcatgatcttggctcacctcaacctccacctcctgggttcaaccgattcccctgcctcagcctcccgagtagctgggattacaggcgcctgccaccacgcccggctaatttttgtatttttagtagagacagggtttcaccatgttggtcaggctgatctcgaactcctgacctcaggtgatccgcctgtctcggcctcccaaagtgctgggattacaggcgtgagccactgcgcccagcctgcccccttggtattaatttacatatttattacttgggctgggtacagtggctcctgcctgtaatgtcaacactttggaaggctgagacaggtggattgcttgagcttaggagtccaagaccagcgtgaccaacatggcgaaatcacaactctacaaaaaataaaaaaattagccaggtgtggtggcatgcccctgtagccccagctacagggaggctgaggtggaaggtttgcttgagccccggaggttgaggctgcagtgtgctatgattgcactactgcattctagcctgagcaagagtgaggccctctcaaaaaaacaaaaattactggccgggcggagtggctcacgcctattaccccagcactttggatggccaaggcgggcagatcacgaggtcaggagatcaagatcatcctggtaacacaatgaaacccagtccctactaaaaagatacaaaaggccgggcacagtggctcacgcctgtaatcccagcactttgggaggctgaggtgggcggatcacaaggtcaggagatcgagaccatcctggataacatgatgaaaccccatctctactaaaaatatttaaaaaattagccgggcgtggtggcgggcgtctgtagtcccaggtactcaggaggctgaggcaggagaatggggtgaacccgggaggcggagcttgcagtgagccgagatcgcgccaccgcactccagcctgggccacagagcgagactccgtctcaaaaaaaaaattatttatgtattatttatttatttatgcctttggtgcacgcatgggtggaatgagggcgatctatgattaccggtgagcaggagtctgaggtgggacccatcacttcccatgtgcccagcaaccccagggggagatgcaaggacagcacaaggaaaggggaggcctacactcacctgtgctggtctgtgccttctgcaacttcagaaactgctgcaagaagctaccatcgttggcaaacttgttggaaatgcaggaagagttgtgtgcatttgtgattctagaaccaagacagaggacagagagggtgagctggctagagatggagtgagggcaccagaggacgaggatgaggatgaggccatcacctcgtccatcatggcccctaactcaccccagcactctcacctactgggaccccaaactggcccccagagatttcaagagactactgcgaagtgcgcacagcaggcttcagtacggtaagctgggaacaatcttgttctgataaaagcaatactccatgtattatctctgcctgaatattaaccctccaggtccaaatggccctccaacaagatggctcctgctctctctgcacagcacctgtcctcccttgctagttgattatctgggttgttactgactcatgtctgtcctcctgctagaccttagagttttccaaggcagggcctacatgtctctctctctctgtctctctccctctctatctatctatccgaaacagagttttactctgtcgcccaggctggagtgcagtggggcaatcttggctcactgcaacctcctccacccaggctcaagagattgtcatgtctcagcctcctgagcagctgggattacaagcatgtgccaccacacctggctaatttttgtatttttgtagagatggggtttcgctatgttggctgggctgttctcgaacttctaacctcaagccatcctcccacctcatcctcccaaggtgttgggattacaggtgtgagccaccacacctgacctatttatttaagagacagggtcttgctctgctgccctggctaaagtgcagagtgcaatggtgcgataacagggactgcaggcatgtgccactctgcctggctaattttttaatttttttttttttttttggtagaggtaacatctcactatgttgcctaggctggtcttgaactcctggcctcaagcaatggtcccacctcagcctcccaagtcactaggactaaaggcatgtgacactgttcctggccaatgccatttttttgacaggcatgaagggcagctctgacaacagtatatcagctgtgctcaactttgatttaaatatatttaggcccctgggtttgcctttgtgctaacttgttaaaaacatattttttaaaaagtaaaacatatactttgcaaaaaaaaaaaagagggagagagtgaagataaaatataaaatgccctgtgattcttccagcaagattgctttggctgttttcttagaaatgtttgatgcccaggctgggcgcggtggctcacgcctgtaatcccagcactttgggaggccgaggtgggcggatcacgaggtcaggagatagagaccatcctggctaacacagtgaaaccccatctctactaaaaatacaaagaattagccagatgtggtagcaggcgcctgtagtcccagctacccgggaggctgaggcagaagaatggcgtgaaccaaggaggcagagcttgcagtgagccaagattgcgccactgcactccagcctgggcgacagagcgagactctgtctcaaaaaaaaaaaaaaaaaaaaaaagaaatgtatgatgcccaaagaaatgcttgcagatcccagctctgagctgcaggcccacatgggtaaagaaacacaggctttggctaagcatggtggctcatccctgtaatcccagctacttgggagactgaggtaggagaatcacttgagcccaggagtttgaggctgcagtgacatatgatcatgccactgcacgtctgcctgggcaacagagtgagatcatgtttcttaaaacaaaaaaaagtaacagaggctcattatggaacaaatggaaatgtagaaaaactgaaataagcctaggcaatatggagaaaaccccatctctacgaacaaaacaaaaaattagctgggtgtggtggcgtgtgcctataattccagcattccagaggatcaccggagcccaggaggtcaaggcggaagtgggccgcaatcatgccactgcactctagcctgggtgacagagtaagatcatttaaaaaaaaataaaaagaaaaactgaaacagaaaggaatggaaaaacccaacaatgtctccctactttgcaacagccactattaacactggtatatatctttattttgctctctaaattagaagtcagaggaaataaggctgtgatcacagcacacactctacttcttccatttcctactgtagcacaccatcctgctccaatctcaaattcctcacatacgctgctttttaaacccgcatgacgttccaccatatggatgtacccaatggtgcaaaaagctcatggagtccacagggctagcctttttcctttaaataggagaaaggaataatttttagttcatcagaactaaaataacctaaatacatcaacaaggggcactggttaaataaattacgggccatccacagggaagatggggcagccctgaaaagttgaaattttagacaagcaatcaaatacaatgttaaaggaaaaacaaggccaggcgcggtggctcacgcctgtaatcccagcactttgggaggccaaggcgggtggatcacgtggtcaggagatcgagaccatcctggctaaaacagtgaaaccccgtctctactaaaaattaaaaaaaaaattagccgggcatggtggggggcacctgcagtcccagctactcaggaggctgaggcaggagaatggtgtgaacccaggaggcagagcctgcagtgagccgagatcgtgccactgcactccagcctgggcaacagcgcaagactccatctcaaaaaaaaaataaataaataaaataaataaataaaaaaaaacaaaaggacaggctataaaacagtatctacagtgtggttctacttacatcaaaatacatttgaattaaaaattgttacaaaggccgggtgcgggacctcacacctgtaatcccagcacttcggtaggccaaagcaggcggatcacctgaggtcaggagttcaagaccagcctggccaacatgatgaaaccccgtctctactaaaaatacaaaaaattagccgggcgtggtagcgggcacctgtaatcccagtcactggggaggctgagacagaagaatcacttgaacccaggaagcgaatgttgcagtgggccaagatcgcgccattgcactccagcctggacaacagagttagacttcatctcaaatataaaaaaaaattgttagacaaacacatcgggccaggagcagtggctcacacctgtaaacctaatgctttgggaggccaaggtaggaggatcacttgaacccagaagttcaaaaccaacctgggcaacatagtgagaccccatctacacaaaatttaaaaattagctaggcatggcagtggacatctgtagtcccagctactcaagaggctgaggtgggaagatagcttgagtccaggaattccagactgcagtgagctatgatagtgccactgtactgcagcctgggtgacagagtgagatcctgcctctgaaataaaacaggcccggcacggtggctcaaggctgtaatcccagcactttgggaggcagaggcgggtaggtcacctgtggccaggagttcaagactagcctggtcaacatagtgaaaccctgtctcaactaaaatacaaaaaaatggccgggctcagagacttatgcctgtaatcctagcacttagggaggccgaggtgggaggaacaacctgaggccaggagttaaagaccagcctggccaacatgatgaaaccccatctctactaaaatacaaaaattagccgggcacgatggtgggttcctgtaatcccagctactcgggaggctgagcaggagaatcacttgagcccaagaggcggaggtcgcagtgagccaagatcacaccactgcactccagcctgggcggctgagtgagactctgtctcaaaaaataaaataaataaataaataaataaataaataaatagccgggcatcgtggcgcacactggtaatcccagctactcgagaggctgagcaggagaatctcctgaatccaacaggcggaggttgtagtgagccgagatggcaccactacactccagcctgtgtgacagagcaagactcgtctcaaaaataaataaattaattaattaaataaaattaaaaaaaacagaaaaacacctcaacactcaaccagtgcttgtctctgtgttgcagagttatgagtgactttggttttttgtttacccctcttctacttcctggatttcctaccatgtacatgaattacctttaaagtttaaaaaaagaaggagtagaagtaattttatatgaaaaagaaggttcaatgttgacactaaacaaccaggacattctgggcacccctcagttcctgggcctgcccccatactcacaccctgagcacttcactcaggagggaccaggaagaggtagggacaaggaaagacaagaaatcacattcaggctgcagagtacagcgaacggctcccacctgaaaaccactggtaacaaatactgggagataaaaatgctggttcttggccgggtgcagtggctcacgcctgtaatcccaacactctgggagactgagaggggcggatcacctgaggtcaggagtttgagaccagcctgaccaacaaggagaaaccccgcctctactaaaaatacaaaattggctgggcgtggcagcgcatgcctgtaatcccagctacttgggaggctgaggcaggagaatcgcttgaaacttggaggcagaggttgtggtgagctgagatcgtgccactgcactctagcctaggcaacaaaaaaagaaaaagaaagaagaaaaggcaaacgctgctgggtgcagtggctcacacctgtaatccctttgggaggccaaggtgggaggatcacttgagtctaggagttcgggaccaacctgggcaacataacaagacctcatctctacaaaaatagaaaaaaattagccaggcatggtggcacgtgcctgtggtcccagctacttgggaggctgaggcaagagaactgctaaagcccaagagctcaaggcttcggtgagccatgatcccaccactgcactccggcctgggtgacagagcaaaaccctgtctcaaagaaaaaaaaaaaggaaaagctggagctggaacaaggccttggggaaggttaacacactctacactccagaccccagaggaaggggcctgcctctcagattatcaatctccagcctgaaaagcttggatctggtcaccctcatcacaacatcaccccttgatcaaaacccttggtgccctcagtgtttctcaggacaggcaagtggaaacccttgctgagctatcatccacctgccatccactaagggacagcccctttggtacagcagctcaggctggccctccacatatgggctctctccccttcctgccctctgctgggcaggcctttctctgcttcctcagtgggccagctccacctgggctttcaggatgcaaagctctgtggccttactgtggccacggggcctgggaacacactgcctttgttatcttccaggagctctggggcggcacctgcatccctttgccagtagtttgtcaccccataagggcagaggtttttttttgttttttttttgagacagagtctcactctatggcccagggtagtgtacagtggcacgatctcaactcactgcaacctttgcctgccagatcccagagattctcgtgcctcagcctcctgagcagctgggactacaggcacgtgccacaatgcccagctaattttttgtattttttagtagagatggggtttcactatgttggcaaagctggtctcaaactcctggcctctagtgatcctctgtctcagcctcccaaagggctgagattacaggtgtgaggcagcacacctgaactcaaggcagagatttttactctgttataccccttccctctgcaccacagctggctggcagtaaataactgctgagtggatgagttggcaggctgtcctctgggcttccacatacccctcatttctctcttgccacagtgagcctcccaagggcatctgggtcattccttggatcatcaggctatggctgggtgcaagcacatgctgactgccctcacaagccaaaccctgtgctggtgaccctcaaagactcacatccaggccccatccaggccccagcaggcacttactcgccaggatgtgggggctgagggctggccacctgattctgcttggctttctgttccattttggcttcaatttcccgtttcttctgagcgatgagctcttcctggtgaaggatgttcatgttcatttttccagatttagggggagcaaccccaaaccaccggttagcctttcctggggagggaaaaggagtacgtcggaaatcacccttactccacaaacaccccaagaagctgtgacaggccagagagcaactgatgttcagattaatttatatgtctattagttcatttattcagcaaacacttacagagtgcctgctgcataccataccctgtacttactacgtgctatgcaagagaacacaggtctctgcccacgtgggactcgcttcaggctgggaagacaatagacccataataaaaaagtaactttcgggctggtgcagaggctcatgcctgcaatcccagcactttgggaggcaggggcaggcggatcacttgaggtcaggagatcgagaccagcctggccaacgtggtgaaaccctgtctctactaaaaatacaaaaattagctgggtatggtggcatgtgcctgtaatcccagctactagggaggccgaggcaggaaaattgcttgaaccagggaggtgaaggttgcagtgagccgagatggtgccactgcactccagcctggcaacagagcaagactctgtctcaaaaaaaaaaaaaaaagtaagtgcacaatgtggtaagagctctgctgaaaaccaaaaaagggtgaaaaagtaacaggagagtacatatgcaggtaggacaggcagaaaataaacactagaagaggagacatttaaaccagaaaaaacaaataagaagccagcgtcatgaaaagccaaatgggagatgatctgggcagaagaaggagcagatgtgaaagctcaaggcaggaagaagcctggtacatccaaggagcagcaagtgcccagtgtcagaggggcctgctccagggacaggcagaggtgaggcatgtcagagcatctgtgctttattataagggctttggggagtgatggagaagcactaagatgaagaatgcaagatccattgggtctttttttgagacagggtctggctctgtttctcaggctggagtgcagtggtgtgatctcagctcactgcagcctccgcctccccggctcaagcaatcctcccacctcagcctcccaaatagcttggattacaggcatgcaccacctcacttggctaatttttaaattttttcatagagatgaggtcttgctatagtgcccaggctggtctcaaacattctttccaccttggcctcccaaagtgctgggatttacaggcatgaggcaccgtgccccagtggcttttttttttttttttttttgaggcgaactgttactctgtcagccaagatggaatgcagtggcaccacctcggctcattgcaacctccacctcccaggttcaagcgattctcctgcctcagcctcctgagtagctgggattacaggcgtgagccaccacacctggctaatttttatatttttagtacagttaggatttcgccatgttgtccaggctggtctcgaactcccgtcctcaagggaacctccaatttacgcctctcaaagcgctggaattacaggcgtgagccaccgaacccagccttctttttttttttttttttttttgagatgaagtattgctcttttcccccaggctggagtgcaatggcgcgatcttggctcactgcaatctccacctccagagttccagcgattctcctgcctcagcctcccgagtatctgggactacaggcatctgccgccatgcctggctaattttttcatatttttagtagagatggggcttcaccatgttggccaggctggtctcgaattcctgacctcaagtgatccacccacctcagcctcccaaagtgctgggattacaggcgtgagccaccacacccagccgttttttttgttttgttttgtttttttgagacagggtctcgctgagttgcccaggcaggagtgcagttgcatgatcgtagctcactgcatcctcaaactcctgggctctagagattctcccacctcagccacccgagtggctaggactacaggcacactctaccaggcctagctattttcttttattttttgtagagacaggttcttgctatgttccccaggctaatcttgaactcctgtcctcaagggagcctcccatttaagcctcccaaaatgctgagattttaggcatggatcaccacacctagccaatatccacagggtcgttttattttcatcctggctactaggtaatcattctggccagagaatccacaggcaacaagaccagggaggctcactggctccaagcaacagacaatgatgtcttcagactagggtgatagtatggagacagggaagacacctcagaggttccccatgggactcagaataaaatccaaattttaaaagtctgagccgggcatggtgactcacacctgtaatcccagcacctgggaggctgaagcaggcagatcacttgaggtcaggagatcgagaccagcctggccaacatggtgataccccgtctctactaaaaatacacaaaaacactggccaggtgcggtggccggcgcctgtaatcccagctactcaggaggctgaggcagaagaatggcttgaacccgggaggtagaggttgcagtcagccgacatcgtgccactgcactccagcctgggcgacagagcgaaactccgcttcaacaaaaagaaaaaaagaattctaaaaggccattttcaaggccccgccagatggttcccctcccttctgcttcatccttgacattcttcaaaaggacaagcccatcctaccagggcctctgcatttactggcccccctctgtgtggaaggctccaccctccagggattcccatagctggcattcattgtcttaactcaaatgtcctctgcttgaaaaggcctttccctgggccaggtgtggtggctcacacctttacgtaaccccagcactttaagaggctgagatgggaggatcgcttgagcctaggaattccagacctgcatgggaaacgtggcaacacaaaaaacacacaaattcgctgtgtggtggcgcgcatctgtggtctcagctactagggaggctgaggtgggaggatcacctgaacccagggagccacagtgagccactgcactacagcctgggcgacaaagtgagaccctgtctcaaaaaaaaaaaaaaaaaaaaaaagaaagaaagaaagaaaaggtctttcctgactacccaatatcagaagcctccactctgatcatatcatacgtaacctcacatcatacgtaagtttttgtaaatattttctcattaatgcactgacaccccagtagaaagcaacctccaggaaggcagggccctgtttcggtcaccgctgcatgcgtagcgcccagcacactgcttggcacacagtgagcacgccctaagtatctgctgatgggtaaatgcattctattctggggaagcagaaaggccaaggcttgcagcaaagtgagggtcaaaagacgcgggaaagtgtgtcaagggagcctcaaagcacttcggaaaagcagcttttccagaaagcgggacacaggccagaggccagctgcgacgaaaagaggggtgcagggacagcccaaggttgtcgccgtattggggaacggaggttggagcagccctgaaggcggttgtttcggaaacgggacgcagggccgagccgggtggcggcctctacggagatccgtgcgtcctcagcaaaccaagcgggggcggccagcaacctgggtctggggtctcgagaaaccaagaggtgcagaagccgacgctgtgggctgccccggggctgaagcgagggatccacgggtcgcagcaggacggacccgaggagtcaggggagacacctagccccagggacccaggcggccgcctgagaggaggcgggggctgttacctgcaacatcccggttgtccatcttgagactcatccaatcccacaatgctccggcgccccttaaggggccctgttatagtgtgcatcgcctgatgggagatgtagtccgcctcggtcagactcgccctattactgcgtgaacgactgggtttttttttttttaacctccagaaacggaagcctcagcctatcagcgatgcctaagtcccagtcacgataaccaaacggcgtcgcccttttacaccttcccggagcggcagtcatcccaaatacaaactacatgttccaggatgctttgggcggcagatctcgcggaagccgcgaggagagcccggccccgtctcgcgcgcctgcttccgcctccctgtggcggcggcttgttgttgtggaggccaaaatggcggctcaggcggcggcagcggcccaggcggcggcggcccaggctgcgcaggccgaggcggccgactcgtggtacctggcgcttctgggcttcgctgagcacttccgcacttccagcccgcccaaaatccgcctgtgcgtgcactgcctgcaggccgtgttccccttcaagccgccgcagcgcatcgaggcccgtacacacctgcagctgggctccgttctctatcaccacaccaagaacagcgagcaggcgcgcagccacctggagaaggcggtgagcgcgggccgggccgcgagggaggagtcgcgggctccttgcaagatctgggctgacgggtcgcgaccgcggcgggtggggggccgctcctcggcgacctgggggcgcgacctccgtcaaagccgcaggacccccacccgcctctgccggaccccaaagccaccagcctctcaagggacacgaaagcctcgccccccacgccttatttcccgtttctggtgacagggctccaggagccccgtcaccgtactctgaaagttgcctgttattgggagcaacaggatccgcaaatcgtctggttttcaggaggatcccacctgttggtggcgatggggacatcacagggtcctgaagctattagctcctcctggttcagcttccggagcatcagccccaaacgcttccacctaaagtgacttggggtaggggttggcgaaggcgagacccctggcattctcccgggaatctgaagtctggtctctcaggaacctggaagggcatgattctccttggacacagaagtttggtaatcgtggtttttggagggtcttgtgcccccatcaataatgcctggtgtcgtacgagggaagctgagacccggagtctggagttggtcatttgaggcctatgaggaggagaaacaggggttctggattccaggccccgctgttcagtttcagtattaggggaactaaaagcagctcctgctttttctccatccactggtgacttctaccatccatcagtccatcctcttccgtcagagtgagtccctcccctgacccaacttgatttgtgtcatcttggtgcctcaaagaatgcgggagagtggctgtcattctgccctttagtaaactttctttttttttttttttttgagacggagtcttgctctgtcacccaggctggagtgcagtggtgccatcttggctcactgcaagttccgcctcccgggttcaggccattctcctgcctcagcctcctgagtagctgagactacaggcgcccgccaccacgcctgcctaattttttgtattttttagtagagatggggtttcaccgtgttagccagggtggtctccatctcctgacctcatgatctgcccacctcggcctcccacagtgctgggattacaggcttgagccaccgcgcccggcccctttaataaactttctagggccaggctcagtggcttatgtctgtaatcccagtattttgggaggcggaggcagacagattactagaccccaggagtttgagaccagcctgggcaacacagtgagatcccgtctctacaaaaaatacaaaaactagctgggcgtactgacgcgggcctgtagtcccatctactccagaggctgaggtgggaggatcagctaagccccgggaggtcgtggctgcagtgagcagtgatcacgccacttcactccagccttggtgacagtgaaaccctgtctcagaaaaaaaagataataaggaaaaaataataaaatttcaggctgtggagtcgtttttttctcacagcagcgctgtgatcctgtcagacccctgcctcccttttaccttttacccagctctgtcctgcttgaatagaaaattattgaaaagaatcaactcagattttaaaaactcattaatctgaggtaaatccaagcccaccctcagctagtaacaacttgccttgaggaatagatcaaatctttgtttcacagactgaaaagttggaaggagactttattttattttattttatttatttgtttattttgagacggagtttcgctcttgttgccggggctgtagcgcaatggcaggatctcagcccactgcaacctccgtctcccgggttcaagtgattctcctgcctcagcctcccgagtagctgggactacaggtgtgcgccaccacacccagctaatttttgtatttttagtagagacgggttcacagtattggccaggctggtcttgaactcctgaccttgtgatccactcccctcggcctcccaaagtgctgagattacaggcatgagccactgcgcccagccccagataattttttttcttttttttttgagacagattctcgctttgtcaccaggctggagtgcagtggcgcggtcttggctcactgcaacttccgtctcgtgggttcaagcaattctcttgcctcagcctcccgagtagctgggattacaggcttgcaccacatcatctggctaatttttgtatttttagtagagacagagtttcaccatttggtcaggctggtttcgaactcctgacctcaagtgatccgcccatcttgtcctcccaaagtgctaggattataggtgtgagtcaccacatctggccagttttatttatttatttatttatttattttgagacagggtctcgctccatcaccccggctggggtgcactggcgtgatctcagctcactgcagccttgacctcctgggctcaagcagtcctcccatctcagcctcctgagtagttgggaccacaggtacgcaccaccacacccagctaatttttgtgttttttgtaaagacaagggcttgaactcctgagctcaagccatccacctgcctcagcctcccaaagtgctggaactacaggcttgagccattgtgcccagcgtggaaggcaactttagtcctcacttgatcaactgccttgtttcaaaagggaggcattatgggcccagagaggtaaagtgatttgcccaaggctgcacaacaagttattgacaaaactaggctcaaactccagctcagtgataaccaggttacatgccaagatgatacatcattattgttttggtgaagttttttttcctttgattcattcaacagatacttgttcagctcatgcaggatgccaagccctatttttggtgccgggggatcagcaatggctaaaacagtttctgcccacgtaagcctaggttttcatgaggaagacaaatgataagcatatagtaagaggttaggcagtgatggaagaaccttgagaactgaaccagggagaagagatggagttgacttggagctatttttggcagaggtagtgagagagtctctatttgtgggagtgacatttgagcagaggcctgaatgggtggggcagggagcctggagaaccactcggggggtcaggttgatggcaaggagtgcctaagctgtcggggactggcagatggtatcagggtctctccagggtcatgatgaggctgagatcaaatgaggcaccagactttattgactgggaggggtctggtggcccagcatctccagtggatgtgctggttctaaaactctcctttctctccatgaacaactcccaccacctgccttcccttgtctcccagggctgttcagcctgtttctggcagtggctaatagtcactgtgtgtactgtcgtattttgcccactcagccctgtctaggagaagcagtcatgctgcaaattgctcgctttaccacttggcttttggacccataatttaaacccttctccttgcgaagtgcctttgctctgtcaaatggaactttgaatcttgaagggtcttccactgagccacatggtgccctctgtagctcacgccaactttatgcctggaaatcccgttctttttgtcagtcgcatcccaactgaaaatttttccagcttttagttaaagtaatgttttctatactgttttccttccaccaacgtttgtgaattttttttgtgttacaacataagcatgctttctttcatcttcattctttattaattgtgcattttttcccaatcagggagctatcaacttttattctttccttccccagagctacttaataaagaatcgtatgttctccgcttagaggtggtttgctggtttctacttctgaaaagcaaatggctgaagagattccagtgtcttcttggagagccaacccagtgtaacagtattttgcaatagtttgtgacatttctccttgctcattctctctgctgttctttttatttttattgttacttttattttatttatttattttttgagatgtagtcttgctctgtcacccaggctctggagtgcaatggcgcaatcttggctcactgcaacctctgcctcccgggttcaagcgagtctcctgcctcagcctcccaagcagctgggattacaggcgcccaccaccacgcccagctaatttttgtatttttagtaaagaaggggtttcaccacgttggtcaggctggccttgaactcctgacgtcaggtgatccacccgccttggcctcccaaagtgctgggattacaggtgtgagccaccacacccagcctattttatttttcatttttttgagaaggagtttcactcctattacccaggctggagtgcagtggtgcgatttcagctcactgcatactccacctcccgggttcaaacgattctcctaccacaacctcctgagtagctaggattacaggcatgtgccaccatgcccagctaattttgtatttttagtagaaacaaggtttcatcatgttagtcaagctggtctcgaactcctgacctcaggtgatctgcccgcctcagcctcccaaaatgccgggattacaggcatgccaccacacccggcatctctctgctcttcttcactgaactaattttctctaacataagtgcttaggtaaaacctattattggcccctgaactcagtgctacatccagctttcctattgttttcactgtcttttgctttctctctaagagaccccagcctccttggtcatcacatttttatttaaggttatttctcttttatctgcttctgtcagtttctaatggtctcctcaactgcatttttttttttttttttttgagacagagtctcactttgttgcccaggctggagtgcaatggcgcaatctcaaatcattgtaacctccgccctccgggttcaagcgatcctcccacctcagcctcctgagtagctgggattataggtgtgtgtcaccatgcctggccctcaactgcattttaagtcgtctagaaagatatataacatacttactcgtctacttcatcaagtcaactaactttgaaagaatcatccattaaatgtccccatcaggccaggtgtggtggctcacacctgcaatcccaagactttgtgaggccaaagtgggcagattgcttaagcccaggagttcaagaccggccttggcaacatagcaaaaccctgtctctaccagaaaaaaaaatatagccgggcgcggtggctcacgcctgtaatcccagcactttgggaggccaaggtgggcggatcacgaggtcaggagatcgagaccatcctggctaacaaggtgaaaccctgtctctactaaaaaatacaaaaattagccaggcgtggtggcgggcgcctgtagtcccagctactcgggaggctgaggcaggagaatggcgtgaacccgggcggcggagcttgcagtgagctgagatcgcgccactgcactccagactgggcgaaagagcgagactgtctcaaaaaaaaatatatatatgtatatatatatatatatacatatatatatatatacacaaaaattaaccaggcatggtggcacatgactctggtcccagctactcaggaggctaaggcaagacaattcttgagccaggaagttgaggctacagtgagctgtgatcgtgccactgcactccaccctggacaacagaccgagaccctgtctcaaaactttaaaaaaagaatccccatcagagtcaaagagggtatgtcttcctttcctcagcaactttttaaaaatttgattgtatttatttttatattttctatagagctagggtctaactgtgttgcccaggctggtcttaaactccgggcctcaagcaatcacctgccttggcctctcaaagtgctgggattacaggtgtgagccaccacacacagcctccccaggagctttttttttttttttttttagatggactctcactctgttgcccaggctggagtgcagtggcgcaatctcagctcattaaaacctctgcctctcaggttcagactattctcctgcctcagcctcccaagcagctgggattacaggtgcctgccaccatgccaggctaattttttctacttgtatttatttatttatttatttatttatttatttatttattttgagacagagtctcgctctgtcgcccaggctggagtgcaatggcgcgatctcggctcactgcaagctccgcctcctgggttcatgccattctcctgcctcagcctcctgagtagctggaactacaggcgcctgccaccacgcccggctaattttttatatttttagtagagacggggtttcaccgtgttagccaggatggtcttgatctcctgacctcatgatccacccgcctcgacctgccaaagtgctgggattacaggcgtgagccactgcgcccggcctctacttttattagagatggggtttcactatgttggccacactggtctcgaactcctcagcagcttttttggggtcacagtagttggtgtctcggtgactcttgcctctgtagggcctcagaacacctgccggccgccttgttccctgggtctgctcagcagattctggagctgttacagtgcatggcaggacactttacctgaaagccttccttctctgagtatggttttggcagtgatgtgggtgtgttttggctgctctgggactcccctaagtaaatagttgatgactataagcattgtcactttacttagacatttcttggctagagaattcgcagtgaccaacctgggcactaccctgtctctacaaaaaatttgaaaattagcgggcccgtggtggctcacatctgtagtcctagctacttgggaagctgaggcgtgaggatcacttgagcccaggaggtcgaggcatcagtgagccgtgttcctgccactgcagtccaatctgggtgacagagagagaccctgtctcaaaaaaaaaaaaaaaaaaattttgcaatgccatttctgcagattctgacaggttgtgttcttctatattttgctttcctcttgttctctctcttcttgctgtacacccatccctgtaagttttcattcttctcctctcttccaggccctatggcttttttcttattttcccacctgtcttttaagcagacagatccatcttggtcatttggacatctgctgttgaatcaagagaatgtacctgcatatccgtttcccccttaacttttttttttttttttgagacagagtctcactctgttgcccaggttggagtgcagtggcgtgatctcggctccctgcaagctccgtctcccgggttcatgccattctcctgcctcagcctcccaagtagctgggactgcaggcgcccaccaccatgcccggctaattttttgtaattttagtagagacggggtttcaccatgttagccaggatggtttcgatctcctgacctcgtaatccgcccgcctcagcctcccaaagtgctgggattacaggcgtgagccaccgcgcccagccacccctttaactttcttacttctgatcacagtcccttttatcccttggcctgggaagtgcaccatcattcttaggttttcctggtttgaaagccacccaggactaaatgccgcctctctggaagaacttactattttctataatccaggcagtcattctttgaacagtggtgttttctgactgcgtatgccatgcttgctttctctgtgtcaatgccatgcgtgctttctctgtggttggaacagggctgctttttaatggtggttttgctcatctgacttagaaagcagctccagactgtgctggtcagatacttaattctgcatccaggtttagcctgagcatctatggttcactttctcagcaagtgattaaatgcttccttttctcttaagacccaacagggctaggttctgagcctctcctcatcaggcccagcgtaagcagttctttcattcttcaggatcacaactgtgtcctgctaaattccgtgtcccatctgcagggagcagagacttgtgcagagctggccgttacgcagtttcatgaagtgatctgtgcttcctcctgtttttgtttctatttccttccctctcactcttgagtcacctctgacttcaggatgtgaaatctgtttaggaaccatcacctcacggttctaccagctggtcccttcctctcccaccccggttcttctacttcctgattgccagttactatagcatcattggcacctactacatgccaggccctgcattggtgcttcacagagcaaggtctccctggatcctcaacaaattaacagggtaaggcccacctcagactcacctgtgatgacacccagccactgcaggagaatgtgcttagccacagtcacacagcagcaagaggccagggaagctgctaaatgctgtgcttccatcccagaggtgttgcaagcaatagggtagtttaaaaaaaaaatgattttgagccaggcatggtggctcatgcctgttatcctagcactttgggaggctaaggcgggaggagtttgagaccagcctgggcaacatagccagaccctgtctcttaaaaaaaaaaaaaaattgaaaaattagccacacatgcctatagtcccagctacttgggaggctgaagtaggaggagtgcttgagcctgagaattcaaggttacagtgagccatgattgcaccactgcattccggcctgggtgacaaaaaccctgtctttttaattatttatttatttatttatttatttattttttatttttttgagataaagtctcactctgtcacccaggctggagtgcagtggcgcaatcttagctccctgccacttctgcctcctgggctcatgtggttcttttgcctcagcttccagagtagctgatgtgacaggcacacaccaccatgcccagctaatttttgtatattttgtagagatggggttttgccatgttgcccaggttggtctcaaactcctgagctcaagcagtccacctgtcttggcctcccaaagtgccaggattacaggcgtgagccattgctcccagccaaccctgtctcttataaaaacaaaacaacaacaggccaggcatggtggctcacgcctgtaatcccggcactttgggaggctgaggtggtagtatctcctgagcccaggagtttgagaccagcctgggcaagatagcgagacccccatctctacaaaaaagtaaaacaattagttgggcctgccaggcgccatggctcacgcctgtaatcccagcactttgggaggccaaggcgggtgcatcacctgaggtcaggagttcgagacctgcctgaccaacatagagaaaccccgtctctactgaaaatacaaaattagccaggcgtgatggcgcatgcctgtaatcccagctactcgggaggctgaggcaggagaatcgcttgaacccgggagccggagggtgccatgagccaagatcacaccattgcactccagcctgggcagcaagagcgaaaattcatctcaaaaaacaaaattagtaggacctggtgagatgcacctgtagtcccagctacttgggagaccgagccaggaggatctcttgagcccaggagtttgaggttacagtgaggaccactgcactccccctgggtggcagagggataccatgtctaaaaactacaatcaaaaaaagccttttttttaaaagttactttggttttaaggaataagaagccttgaaacactcagccctggactgaatcctccaggcaccagagctgtgctggtctggacccttccaccccacttgaaacctgttggccctgttgcaaccctctcttgctttccctgagaaccctaaggtgaccccaggggctgctgatggagacagtcacctccttgccctgctccctgcagcctctcactttggctgctttgctatcataaggaaggaaacataaaagctactttttagcattacaaagttaaaaaaaaaaaacacccgggcacggtggctcacacctgtaatcccagcactttgggaggccgaggcaggcagataacaaggtcaggagaccgagaccgtcctggctaacatggtgaaacccgatttctactgaaaatacaaagaaaaattagccaggcgtggtggcgggcgcctgtagtcccagctactcaggaggctgaggcaggagaatggcgtgaacctgggaggtggagcttgcagtgagctgagatcgcgccactgcactccagcctgggcgacagagtgcaactccgtctcaaaaaaaaaaaaatcacgtagatgaggtagcaaccttgggtaaggcattctacatcctttatttgtgagatggatatatttttctgatttccaaatatatgctacaagtcatacagagggctgggtgaggtggctcacaactgcaatcccagtactttggaaggctgaaatgggacgatcacctgagcccaggagttcaagaccagcctgtgcagcatagcaagaccttccctgtctctacaaaaaaaaaagaaaaacaaaactctaacaaagatacaaaagtgaagtcatttagtaggtgtcagattgatggccctggggaattgactggctcaccctgacaccaggcccatactgcccttcaggaatgtgtgtcctcatgcagagagatccaggtgtcactgatgtcccagtgaagaagcagtggcatttaaagacagggagaaatcccatgccatttagggctttgtgtctgaaaggcatacgcctccgttctgtggccatttgcacttacacagaagccctcactttcctctaatgaactctactcattatccaagtggataaagccatcgttcgatcagcagatgtttcccgagcacctactggatgtcagcttgctgcaggcattgcagccacaactttaaagtcaaacatcatggggcttttttttgtaagagtcagggtcttgccctgttgcccaggctggagtgcaacagcacaatcatagctcactgcagccccaaactcctgggctcaagtgatcctcccacgtcagcctcccaagtaactggcattacagcatgcaccaccatgcctggctgattttttttttttttttttttttttagagcgagagacagggtctcgctgtgttgcccaggccggtcacaaaaagaggggctttatctaatgtcctctgtttgtatgtatttgaagtgggcgataaagctacatgggaaacggatgttaaaaagcgctaggatgtaatttctccagtgccttagagcatcgctaactcacagtggatccacaccttgaacccaatcctctggctcccagtcagcgctcctgacacccactgacgctagtggacgccttccacaagagaatgcttgtatttggagcctttgggcacattacttcccagctcaccagtgctcactgagagcctccccttcctcaggggagatgggatcctctctgtctagcccacccgtggacggacggagctggcagagaggcgagcccgttagcagcaggcatatctggcttgtaaagaagagatgtcttggccagccgctgcggctcacgcctgtaatcccagcacttcgggaggctaaggcgagcagatcacctgaggtcaggagtttgagaccagcctgaccaacgtagagaaaccccatctctactgaaaatacaaaaattagccaggcatggtggcgcatgcctgtaatcccagctacttgggaggctgaggcaggagaatcacttgaacctgggaagcggaggttgcggtgagctgagattatcccattgcactccagcctgggcaacaagagcgaaactccatctcaaaaaaaaaaaagaagagatgtccatggggtcaggagaaatgaggtccagtccaactgtgtgctgaatagattgatgttagccacatcatggccccaaatggagaagggacacaaagctgttgctggccaagcacgatgtccaacgcctgtaatcccagcacctttgaagcccaagacaggagaatcactcaagcctaggaactcgagaccagtctgggcggcgtagccagaccccatctctacaaaaaataaaaaaaattagccagacgtggtggttcgcaccagtagtcccggctactcaggaggctgaggtgggaggatcacttcagcccaggaggtcaaggctgcagtgagctctgattgtactgctgcactccagcctggacaacacagtgagactgtgtctcaaaaaaaaggaaaagctgttgctatgaggagacattgttggacccacatgggcctgagctcggtggcataggccaaagctttgtagaagggggtgtagtattctgaggcatgaagtgactggacatgtccttttgaagtctacccgccacagacatgcacgtgtgggctgtcgtcagctctggggagagcatcccatggccacagactggaaaggaaagcttctccgcccaaagggaggagggggaattcacgtgttgactggtcgccttgcttacctctgctgggatgcagtgacagaaatggggccagctttgtcacaggtgccaggcttagctgcaggtgccaggtttgcaccttgctcacccaggctggggctgctgcttgtgtgtggcagtgctgtctaccctggactgtgtctgaagagctcccccttgccagccccatggtgcccaaatcagaaccaccaaatctcagggttcagggagacctcagcccagctctagtacggctcctctgtcacagtcccctctctcctgtgtgattgggcatcccttccagttggtggccttccagagcttcttgtgttagacccggcttctcagtgggatgcagcagcttctgtggaaaaaagcccccaacttctgctcttctgttgcatcacacacgttgccactgtccccacacacagcctctagctgaggagcctcacctctggggccacacttctgacggcaggtgctggccccgccactctgaggaccccgagcccctcctgtccgtgccacaagaggggaccacaggaggcagacgcttgggctggcagagggcctgtggtctgggctcctgcgtgtgggtgcatgtgtgtcaggggctcgggctctctcccacagctgtcctcctggccccctgtgtcttggcagtagctgctctcgatgcagctctgtgctttcccagtgcctgtgacattcccagctgctgctcacccttgccctagagatctccagccccaaggctgcccccagccgtggatctccaggcctcactggctcctccgcactcccttcgtgaatactctctgctgcatccaggatggtctgaaaactcccatctgggcaggtgctttcattttccacccctgactgagtcagcttccaggggtgacaccagggcattctgaccctcagctaggagtggccgctgttgccgcatgagtggcagagaccatcgggcttcagcctcacctccctggccctctgccttttttatgggcttttcagtgcctggagcacctcctgctcccccttttcctggagaactggcccctcacttcccatacttgccacacatgctgccctgccccatgcagtcctcccacagagtgcgatgagttagggtctcctgctgtgctccggatccaccttccagcaaccaccgaggctcttgtcaggtgcaggttgctctgaatgtgtgtggcacatgcgagtcgctggggacagcgttaggcttgtgtgcttgggaccctgggtggtctgatgggctgtggtcagtggcctggactagcctgggaactgttggaacatggaactttagggcacagtggtccctgagttggagcctgttgtctgaactgccttcctggtgtgcatcttcagtgccatcccgcagttctgcctgtgtcagcccttcctggagccccctccctcccctctgagagactgactttgcttatagccaagcatctttcaaatgcctcttgctcagaaggactaaccttgccccccaagacccattctccagttgaaactgatttctcgtgttatgctttgctgaacgtccttcctctctgcctgacctctgactgccagccctacttccgtgtgacacctgggggccttgctgtggccaggtcacctctgagctctgttcctttctgaagcagctcccacccatgggcctgtggggtctgactccaagtgcgagcccctcctctgatgtcagaagggcatgtcccctcctgcccaggcacccactggggctctatagcttccattcccctggctggattggaggggagtaagcctaccctctcaggccaagcgggccgccttcttgttacctggatacctggcagcctctgttctcaggacaacctgtggaagccccagagcgagccagtaaccaggtgccaggtgtttgcctgagaattaatcgttgttttctttctttttcagtggttgatatcacagcaagtatcctttccgtgttggtatggttccctttaaggaattctccacttaaataaaaagaatgtatcaaagcttgaatcccacctcccgacatgccctgtgagttgaggctcggcccacagagcacctggagtgtcccccacctggccctctgctgcccttgggcgctgtgctcctctttgtgcttctcttcgtaccttgcatccagctccaagccctgccctgcagcaagctcaaggttcactgggggaacaggaaaacttggaatttcagggcaggcagggacgtgtgtgccctgcagaccttggcagggtaggagccccaagctgtggccctttcaaaccgacctttttcgcagtgtctgtacttccttaactggacgtcactagatcccgcagttcgaagatgttaaatttgaagcagcaagtctgttgtctgaattgtactgtcaagaggtaagaacatattaaggtttctgaaagcaaagtgtctctccgtgtcgctaagacatgacagcacattggtaaattggggttccgggagttggaatccctccggctttttttgtttttttggtcggggtgggaggacagggtctcactctgtcgcccaggctggagtgcatggcacaatcatggctcaccgcagccttaaactcctgagctcaagtgatcctcccacctcagcctcccgagcagctgggactataggcatgcaccaccatgcctggctaattttttttatttgttctagagatgatctcgcccaggctggcctcaagcaatcctgcctcgacttcccaaagtgccaaaattatacacaggaaccactgtgcccagcccggtggcttttaacactcagattactttcctgcctcttatgccccagccccagggctttggtgggtagccacctgctaaggagggccagcagcttccttttctacataagactgttggaaagatcagcctgttcctcacctgacaagtctgtacagtttctcttcttaatctggttcctaatttcaattgtagccgaaatctgccttcctcccacctcagaatgatgacgggtaaggtggcattggcagcagggaatgtgtgtgcttcacaccctgatgcctctctctggtctgagaacataaaagaagggaactggcgtctgatttgagtgtttagaattttgaactgaaactactttcagtccagttgaatgagaagttattttaagagtgatgcagaaacttcccagccagtgagtccaataaaatatctttttttacttttaataaagtaaattggcaaccccaaaaaatcctttggtaagcatgaacaggaactgccttctggcaccacagctgctgctaaggaatccagcttgattgccgccttgttttttttttttcttacattcccaaacgtgactatttcctttcagaattccgttgatgcagcaaagccgctgctgcggaaggcgatccagatctcacagcagaccccatattggcactgccgcctgctcttccagctcgctgtgagtaccgcggcccgggaacgagggtgcccggcagggaccatgaccctggggcacacctgccccatttgcaaagaacagcagagtccacgatgcgcagaccccctcgggctggcacatggagtaggtggggacatgggaacatttccttaacctgcacacaagcccctttcagcctccatccttgagagcatctctggcttgagcctggctctcggcaacacccaggggtgagtggtgggagtgcggggcttccccggggccaacactgacagcgggcctgctgcttgttgggtgtctttgggttcccctccctcccagccgttctcatctcatctttggcctgcactcattgaaatcccaggaacatttcctgccagagacccactgtgggttttttttaggagctacactgagactccaaggggctgcctatcaggccacaaatggccatgtcaagcattgtgtcccacatggggcccctcacgttggaggctgctggggcacaccctcatcctgggatccacacagttcctcctcatgctccctttggcccccccagatataggtgaagccctggtctctgagctccacagtgctcggttgttgggggactctgaactcggccttcccggctgcagtggaggggccggcaggctccaccacgtggggcacctctcctgtcctgggctccacccatacttctgcactggggaccctcaggcgggtggccggcccccggcctctctcttccatgacccagcctgccttccgggccaccacttagccacctcccatgacacctatgcagtatgtggaccctgggttgggagttcctccagctgagtccctcaccccaggagggtctggctgagaaaagtacgcacagggaagagctcccccagcagccaggagttcccgaggccctcctcccccaggcctgatgagaagctgcatacacatgctgtgtccttccatctccccacgcactcttgtgcccattagcagacaaaggagcaggccaggccgtgagtcacctcccctgggccacagagttggcaggcaccatgtgcacgcacacccaagggccgagctcttcaccacagccccataggtattgccttgcagggtcaagccaggcatgtgcctccctttcagcctgttcagactttgacacttgcctctgagggagtccctccttgtcggccctggaacacactagggacaccccactgaagacagaccccacaaagcactcagaacagccttaggtgctcacacagccttgggggtctgtgccgtgagccttggctgctggttctatgctccattaagtttagatagtgtccactgcaggcaccattcagtttagatgacatatatactacaggccaactggagctgtgtacccaaagcaattagcgttgataagataatttggttaatttagctcaaaactgacacaggcagtttcactgacgtggggaggtttggttgagtttgctaacagagcacgaaggcaggtaccgtaaaactgatgggtttggcagcaaaggtcactgctctctttcctttttagcaactgcacacgcttgagaaggacctggtgtcggcctgtgacctcctgggtgtaggggccgagtacgcccgggtggtgggatctgaatacacacggtaggcacccactcccctccttccctcctgctctgttaacaggaggggcttggccatcttggtccaggacaaataacagaaatggcatttcaggtgaagtacagtagctcacagtatattcccagcactttggaaggccaaggtaggaggatcacttgagcccaggagttcaagaccagcctggggaacatagtgaaaccccatctccacaaaaaatacaaaaattgggtccgggcacagtggcttacgcctgtaatcccagcactttgagaggctaacgtgggaggatcacgaggtcaagagattgagcccaccctggccaacatggtgaaacctgtttctactaaaaatacaaaaattagctgggcgtggtggtgggtacctgtaatcccaggtactcgggaggctgaggcaggagactagcttgaacccgggaggcagaggttgcagtgagccaagatcatgccactgtactccagcctggcgacagagcgagactccgtctcaaaaaaaaaaaaattagtcaccatgaggcgcgggtttgagcctgagttcaggcacccaagcctgcccactggccccaacgctgtgtgtccaccgccgcgtttttttttgttgttttttttttgtagagatagggtctcaccatgttgcctaggctggtctcaaacttctgacctcaagtgatctgcccaccttggtctcccaaagtgctgggattataggcatgagccattgcacccaaccgccttctgggcttttcacgtgagtgcgtctaagccatgtaagaaaaataaatacaggccaggcacagtggctgacacctgaaatcccagcactttgggaggccgaggcaggtggatcacatgaggtcaggagtttgagaccagcctggccaacatggtgaaaccccgtctctactaaaaatataaaaattagccaggcatggccgggcgcagtggctcacacctgtaatcccagcactttgggaggccaaggtgggcagatcacgaggtcaggagatcaagaccatcctgtgaatggtgaaaccccgtctctactaaaaatacaaaaaattagctgggcatggtggcgggcgcctgtagtcccagctactcaggaggctgaggcgggagaatggcatgaacccaggacgcggaggttgcagtgagctgagatcgcgccactgcactccagcctgggcgacagagcgagactccatctcaaaaaaaaaaaaaaaaaaattaaccaggcatggtgccaggtgcctgtagtcccaggtgctcaggaggctgaggcaggagaatcgcttgaacccgggaagcataggttgcagtgaatcgagatcacaccattgcactccagcctgggcaacagagtgagactctaagaaaaaaataataaaaaaaataaaaacaggccgggcgcggtggctcacacctgtaatcccagcactttgggaggccgaggcgggtggatcacgaggtcaggagatcgagaccatcctggctaacacggtgaaattctgtctctactaaaaatacaaaaaattagccgggcgtggtggcgggcgcctgtagtcccagctactcaggaggctgaggcaggagaatggcgtgaacctgggaggctgagcttgcagtgagctgagaccgcaccactgcactccagcctgggcgacagagcgagactccgtctcaaaaaaataaataaataaataaaaataaaaataaacacagacacaataggataaaacagagcagtcttgtaaggggactgttctctgttgtccactgaactgtcccctgaggtggcatattaggtcctgtgagccttggggtaatcacagtcatcccaggaggctcctgggcctgctaggacctgacccctgcctcttgttttgcagggcgctgttcctcctcagcaaggggatggtaagttgaggctgggcatggctggatgcagctggtgttgtggaggtgaggcagggcccccacagagtctgctcagaccccacccactctccatggcatggccccttaggcgcccagacccttaggcacagtgagcagcctggaatgtgaggcccgggccctgctgggttcaggagggaaactcaggctgcaccctatgggattcatgctgaggcaagagcctggttaggagctgcctgggctggggtttcaggctggccttgccctctggattggtggcagcagtcccagggcaggtgggcaggtgaccctgtgctcccggtcctgggagggcccctgcaagccctgtaccctacacctgcgcctctccctccccagctgctgctgatggagcgaaagctgcaggaggtgcacccgctgctgaccctctgcgggcagatcgtggagaactggcaggggaaccccatccagaaggagtcgctgcgtgtcttcttcctggtgctccaggtcacccactatctggatgccgggcaggtgtgtggcgcctctcaggcgagctgctggttgtgaccagtgggtatgggtggtacccaggccaatgggtcttgggctgtgaggtcagctgtgtcatcgccttaccttgccacacaacagggctgtcataccagtcccggacacacacactcctgtcctgctctgccacgagtgctggtatctgggaacagggtctgtcctggccaccccacctccctttgggagtactatgtgtgacattgcatacactcgctcagtgtatggatgctcagagattccaatggcagttcagggaatcatgagaataaaccacagaggtgctgggatggcacctgcacacagcagatgcccaggtgctgtctgtctggcccccggctgtggggttgagtagggactgatgtgctcagccatgtccgagactggactcatgaccctgccgtgggtggggagcggctgtgtttgagctccttgtctctgtgcttgtgtgacagtctcagcccttcgggggctgggggctgccctgtgccactcagacccacccctgtcgcagtgggccacaggcgagtctccacagggcttggtaagggggttgcccagttcgtccatccatacccatcgttgcccattgggtgaagcactgcactcggcgcatagggacacagagcagactgcagccacgcttccctcagggtgcaagggctgcagagacatccctcggggcctcagggcgagatggaccacagcgcctgcctgattcctgggccaggaagccacctcccaccccctcagagcacagcctccccctgccgtctcaggtctggctgcgtgaagaccaagtgcagctccagcagggtctggataggcctctcctgggccttggtgttggacccaacactgggcagtggacaagcctcagtcccacagctgcccgcctggctgtgccccatgccccaaaagcctggctgattcatgggagtgcggcaggggcggcttcatcttgcaggaggtggccctggcagaaggggaaggcagatgctccctagaggaaggagcaggggtggctgggctgggcctggcttcctgagaggccaggctcaggtggatgctcgggtgtgggtgctgcacaggtgaagagcgtgaagccgtgtctgaagcagctgcagcagtgcatccagaccatctccacactgcacgatgatgagatcctgcccagcaaccccgctgacctcttccactggctgcccaaggagcacatgtgtgtgcttgtctacctggtgcgtccccaccagggcccgggccagggctgggggcgggggcagggagagggagagggccctggtaacccctgctgtctggtcttgtcgctaggtgactgtgatgcactccatgcaggccggctacctggagaaggcgcagaagtacacggacaaggccctcatgcagctggagaagctcaagagtaagtcaggtgctcggctggccacatggccacagcgacccctggcggacggcctggccagacgctagctgtaccagggcccagtgaccctgtgtgaccgcagcgcccagccaccctgcctggtgggtctcgtcacccctagttgataaatgctggtgtccaacgtcagagcagagcagacaggcctggggtcgggggtacctccctgactggtcaggtcccttgtgcccagtcatgctcagttgaaacaggtggtagctgcttttcccaattattatcagtgttgtgacagggacactcgggatgaggccaggatcagaactcagccctcactgaccaccagcatgtcctttggaggtcgtgagttctttccagatgctcaagtgtctaatccatccagggacctttgactagcacaaacccagagcagacgtccctggctggtatagtgtgcccattagtcggtctgtttgctccctcgtgagtgctgctgggggagaaggcatcagagccaaggcagcccaaagccggataggccctgtgcttctcttattcccatatgaggatggttgcttggggctgttgggaggtggggcccagcccaggtccccctacccgactgcctgaggctctgctgcatggtgtcatgatccagggtggtttccacatttctacatttctagaacctgccatgtccacaagctcttgagcacgtagggtgagggtgagggtgagagccaacccttcttggagcactgtgggaaccaacctctggctccagctccgtctccccacctggacagcaagacacactccttcactcagagggtgcagtggggactaggggagatgacggggtgggtgcctagccagtgtggcaggagacaggaacgaggtgggggcacggtgggctgggggtggcgcctcctctggcctcccctgcatgcttacccctgactctcacccatagtgctggactgcagccccatcctgtcatccttccaagtgatcctgctggagcacatcatcatgtgccgccttgtcacgggtcacaaggccacggcgctgcaggaggtaaggctggaagcaggaggggcgggaaggcccaggagtttgttgggtctcagcagtgtcagacaagagactgaattcgccaagtgcatactggcaggccagcccatcctgctgtctcgctgtcggccagcgttttacagccctgcatgggcaccactgatcagagaatctcatacaaaaaccagtggaggccgggcgcagtggctcacgcctgtcatcccagcagtttgggaggccgaggcgggtggatcacttgaggccaggagtttgagaccagcctggccaacatggcgaaaccccgcctctactaaaaatataaaaattagccaggtgtggtggcagacacctgtaatcccagttacttgagaggctgaggcaggagaatagcctgaacccaggaggcagaggttgcagtgagccgagatcgcactactgcactccaacctgggcaacagagtgagactccatctcaaaaaaaaaaacccaaaaaactaatgggccatggcccaaaagcttgcacaccaaggggatagcgcacatggtctctggggatttggggggtcctttgacagtgattgttataccccaccctgccattaggaacactctacccccagtacccaccctcctgagagggcatgggggccctcagtaggctggaggtcctttacaacccagacacctgttggacagagtggaagagacgagtaacagacaagggtccctgtccacgatgggatctgggctgccctttgccctcatggtggacgtgtctgctggggctttgtaccccagtttggtcagacaggacatgggctcacccaccagctatggggtctctccattgctgctcagacgccaggtcccaggttgcagtcctgtgatggcagtacactctctcccggcagatctcccaggtctgccagctgtgccagcagtccccccggctcttctccaaccatgcagcacagctgcacacattgctggtgagtaaccctgtgacaacaccccgggagaatccagaatgttctcagtaagtaagtacctaaccagatccagaacattcccagtgaaggaccccctgacagcaccctaatcagaatccggaatgttcccataggtaatcatataaccttcccaggcacgatccggaatgctcccagtgagcatcttgtcccaccccacattggcttgggtctgaaaggtggggacagtgagcatattacctgccttgcagctggctcggtagagccattgtcatactcctccagggcagccgtgcaggccccgggcacaccacgtgtctctgatctgagccccctccccaggggccggccctgatgacaacaccaccttcttccagggcctgtactgtgtctctgtcaactgcatggacaacgcggaagcccagttcaccacggccctgcgggtaaggtgccggccctccttgctgctcggggcgggccacacttctgagtaaggagtcgggcgtggtctgtgatgaggacagcagtcgcgctaggtcagctatgcaaagccgcagccccagaggcaatgcacagtagtcagcccatgccagccttggcagtgacgcgctgtttatctggataagggacagctatggggccaggggcttcctgagctgacccaagggcagacgtgagggagaggtgcgacgcgtccggggacaccactttcatgcctgagtgggaacttttgcggcacccacccccaaggctggattggctcaagtgtcagctgacaactcagagccatcctgggttcagggctcccatggggagtggtggagctgggccatctcccaggtgctctttggacagaggaggactcttggtcctgctgggccggagagggtgaagcagcaccccaggctcctggccttagacgggggccccgccaggccctggaagaaggctggtgccacatcctcacggagcgccccagcccagggctggaccattgtgtccccacctcagcctcaacctcctcacaggaaatggaggctgtggacacctttttcctggtggtgccaggaagggccctgaggagaggtgtcagggagcagaggctgctctgtctgccactcgggcaaggtcaccagggagtcctgtgtgcgccctgactgttggacagggttcccattccacggcaccccgcaggcctgtgggtgctgccacccccgccactggcctcagagatgcacaggagccctgacatgcagacagcatgcttgggagggaagggctgactcagcacccactcctctgcctcctcacctcgctcccaggaccctggctcactctgactgcagcagggccaggaccctcctcgtggccctgccatcctgccatctccgtctccgtctcactccccacaagtggttgctattgctggtttggttccgcgtcaaagttcccaaggccatgtaccctaaggagtcctcaccccgaggccaaaagagagcctctttttcatggcccacccaggagtgatggagccaggatgcaaccccaacacccctaaccccaaacacacacgcctcctgtggccctgaaacaaacatctcccaccttgctacgtctcagagcatctgtgcttgattcggaagatcctctgggcctcctgggtgtgtgccaggaggggatctgtgcaggtggggtctgtgcttcctgggctcactccacctcttgcccagccccactgggaaccagggtctgagcagggcttgagctacatagattggaccctctcttgacgaacgatctcatttgccaagaagagccagggaccatggcccatccaccacctgtcatcagcagcatttctggtctctgacacagcatcacctacctggagcggggcctgtgctggccccctgtgggacaacagctcccctcttccccacttccccctatgaagagtgacccccgcctaggaccagcatatgccttgatggcagtggacacctgggtcccacaggttgctggctgtggcctggaggaagggtccaccaggtctcagtcctgagagacagtggaaaatggaccaaaacccgacatgttctgagggtaggattggggtggctggttttcctcttctgtgttctctaactgccccgtaacgcagatgatggttttataatgagaagaagtaatagctgtgttatccttgagcttaggaggcaaaacaagtgtgtttgaaatgaaaagaacaagtcttttccaaagtagtctccgtggagattgtgggtgctctgacactgccacatgggtcacagcacccgacccagccccctaatgtccccgcctcccattccagctcaccaaccaccaggagctgtgggccttcatcgtcaccaacctggcgagtgtgtatatacgggaaggaaatagacaccaagaggtagtaggtgacatgcttcatgttcggtatcctttctctctgttctcttctttttggggaaccagggggttgtcctgggcaccagcacatctcagcagaccccagggtgttcaccttttgagggatgggcggcacccgacacagacacacaaggcgacccagaggtgaatcgggctatggccgggggaggccaggtctgggacaaaaacattcccatagccacagaacacttctctttatcacaaacaaaccaagctgtatgaatcacacagacaaggtcttatagcccaagctgtctgctctaggatgtcggccaggcattgaggctcagtcctaaggggcagcagccagagcaccttgtccccaggttgtgctgatgcccctgcaggatcaggggcactcactggctgcagtgttgggtggggatgcccagggttgccctcacgtggcgcttctgaaccaatgcttgcataagagttaggttccctcttctgtcccttttagccctgggatccccactcagccctgggatccccctcagccccgggatcccctcctcagccccgggatcccctcctcagccctgggatccccctcagctctgggattccctcctcagccctgggatgcccactcagccctgggatccccctcagccctaggatgtccctcagttctagtatctccttcacctctgggggtctacctccaaagtgtatcaggccaggtgcttggctcacacctgtaatcccagcactttgggaagcaaggcaggaggatcacttgaggtcaggagttcaagaccagcctgggcaacatagggagacccccatttctacaaaaaaattttttaaaaacttggtggggtgcaggcctgtggtcccaactactcgggagactgaggcaggaggattgcttgagctagggagattgagggctgcagtgagccatgatccagccactgcactccagcctgggcgacagagcaagaacctgtctcaaaggaaaaagaaagcccagccccggcttagtcatccgatgccatacgtgggctcgcagtgttgaggaggagtttggctcccctgtgcctctgcagctagagggcagctaaattatcagtcagatcacgcccccatcagagcctcccggggtccctgcacctccagagaaatcccacccactcacccccacagcccacagggctcacgggccccagcctgccaacctacccactgccaggccagcccctcagcaccactctgaccatacaaaggccttctggacgcccaggcccctgtcacctactgcaggacagggtggcacaggcagggctggctgagggtgtggaaatcttgcccccggcccttctcaccagaggctgctcttgctggtcagtcaccaggctcagcctggaggccacagtcccgacgggggtgtagagaaattcccatgcactgcagtgtgtcttggggacctttctcctgtgaagatgcagaatggtgctgactggctctttcccccgcagctctacagtctgctggagaggatcaacccggaccacagcttccctgtcaggtgagccgctccaggcaccactccacgcacggcctaggctccccgtgctctttggttggggcccctgactgccccttgcaccctgacaccccatacccctcctcacagacagtctgcagtgggggctctcagaaatagcccccagctgcccactgccgttttgtaaacctgcttctcaaaatcaccaccccatgtgatactgcactctccctgcagctcgcactgcctccgagcagccgccttctatgtgcgtgggctcttctccttcttccagggacgctacaacgaggccaagtaagtgtggggcagagggtggcgtgagggccatgctcagggtagcccaggccccgtcctgcagttatcagcgtccatgttctccttgtcaggcgatttctgcgggaaactctgaagatgtccaatgctgaggacctgaaccggctcacagcctgctccctcgtgcttctgggccacatcttctatgtgctgggaaaccacagggtgagtgccctggcctgggcccctcgcttgggtgcctgtggggcttggctgagggacaggagccggccagcaccctaagggtggcatggcactgttcatcctatgcccctcgaagagcacgtctaggtggatgccctgactcccacagcctgggcaggcagggccagaggagctgggcacccacagagggtgtggggggaaggcaggaggcctgatgggtgtggcctcagacattgggcaggcagagccccagggctcaggggagctgaagccagaaccaaaggagctgccctgagctactggggatgacgcagccaccccatgctatgtgttgacacctgaggggcagagaggtgtctcctctcagccggacttccaaacatatcatccttggccaacacagtgtcctctcagggtacaagtggcccctgggattggtccccacccaaggtcagccagtctctggtgggactggccgcctcagtccttcctgtcaattcctcgcctactctcacccactgatctcacgaggtcttgaattttttttttttttttttttttttaagaagatattttgggcaggcacaatggctcacgcctgtaatcccagcactttgggaggccaaggcgggcagatcacctgaggtcaggagttcaagaccagcctagccaacatagtgaaaccctgtctcttactaaaaatacaaaaattagtggggcgtggtggtggacgcctgtaatccaagctactcgggaggctgaggcatgagaatcacttgaacccaggaggcagaggttgcattgaacggagatcatgccgctgcactccagcctgggcaacagagtgagactctgtctcagaaaaaaaaaaaaaagatgtttttgggacaggcacggtggctcatgcctgtaatcccagcactttgggaggctgaggtgggcagatcacttgaggtcaagagttcaagaccagcctggtcaacatggtgaaacctcatctctactgaaaatacaaaaattagccaggtgtggtggcacacatctgtactcccagctattctggaggctgagacaggagaattgcttgaacccaggaggcagagaggttgcagtaagccgaggtcgtgtcattgtactccatccagcctaggtgagagcaagactccatctcaaaaaaaaaaaggccgggcatggtggctcacgcctgtaatcccagcactttgggaggccaaggcgggcagatcacaaggtcaggagatcgagaccatcctggctaacacggtgaaaccccgtctctactaaaaatacaaaaaattagccgggcatggtggcaggcgcctgtagtcccagctatttgggaggctgaggcaggagaatggcatgaaccaggaaggcggagcttgcagtgagccgagatcccaccactgcactccagcctgggcaacacagcaagactccatctcaaaaaaaaaaaaaaagatatttttggccaggcacagtggctcattgcttgtatccctttgggaggtggatgggggagaatcccttgatcccaggagttcaagaccaccagcctgggcaacctagtgagaccctctttttttttaatttaattttattttttgaggccgagtctcactccgtcacccaagttggagcgcagtggcatgatctcagctcagctcgtggtaaccttcaccccctgtaggctcaagtgatcctcccacctcagcctcccaagtagctggggccacaggtgtgtgccaccatgctcagctaatttttttatttttggtagagactgggtctccatgttacccagactggtcttgaactcctgagctcaagcgatccacccacttcagcctcccaaagtgctagattacagcatgacccactgtgcctggccctagagatgctatctcttaaaaaaaaaaaaaagatattttccagccagacacagtggctcaggcctgtaatcccaacactttgggaggcagaggtggaaggatcatttgagcgcaggaattcaatatcagcctgaccaacatagtagatctgagatcccatctctacaaaaaccaaacaaaaaaattagctgggtgtgtggactcatgcttgtggtcccagctaattgggaggctgaggtgggaggatcacttgagcccaggaggttgaggctgcagtgagctgtgatcatgttactgcactccagcctggacaacacagtgagatccgtctcaaaaaaaaaaagttatttttctagattataaaatatgacatgttcataattaaaaggctgagaagcaaaacagaaaaaaattgcatgtctctgtcatccatcccttcccactgcccacgtctcccacgtggaggttttgcttgtcagcctgtttggtaatttttttttttttttttttttttttttttgagatgaagtcttgctctcttgcccaggctggagtgtagtggtgtgatctcggctcactgcaacctctacctcccaggttccacggattctcctgcctcagcctcccgagtagctgggattacagtcgagcaccatcacacctggcttatttttgtatttttagtagaaatggggtttcgccatgttggccaggcttgtctcaaactcctgacctcaggtgatctgcctacttcagcctcccaaagtgctgggattacagacgtgagccactgggtaattttatatttgcctttctccacacctctgtattggaagcttttttttttttcttaatggcaatgagtgttttgaagccacatctactctgtagtttaaccattctcactgtagccatttccacaggacagataaagcaagatgtgtgtcttggcctgtaaagtttcacgtgatctgagggctccctcagcatggatgctgttaacaaacgtggtgcccgcccaccgcaacacacagacacataactgtgtggtaagcctttgcagaggccagcgaatgggccctgcagctcaggccctggtgggccttggcctcagcactggggatgccactaccccgtcaaaacctgtagctggctccttctagaatgtgctatcaccctgccctcagcctctgagcacagtgagggctgtatgtccccactggacagtgcaagtggcctgggggtgtgtcagatggggaggttaaagtcacacagccccagaccgcagaatcaggactggaacccagacctcactggctctgatttgtgtagaaacccctggaagctgcctggagcagggcaaggagggttgagcagctggttcactgctgctcctggcccatgttttaggtgttgtgggggcatcttacagagctcttttgggaatccccctctgctccctgtgtccctgggcccttgtcgggtgacaagcggcgcccaagaactctcagaccaaggtcctggccttaagtgactccagatctcggggagacacagccagacacagccaagccagtcctgtgaggtcaggctggggacatccagaaaggtggcagccttgggggccgggatagtgttggtgcaggcagggcaaggttggctaggcaggggctgccacagagatgggcaccacagcagtcagagcacaagtgccggagcagacggctgaatggccacaatgggctcaggtgagggtccaggggcccagaagagcttgggatgccctgtcctgagcctgttaggctagagtgtccacaagagcgggacaccccccaggatcactcaagtcttcaaaaccagattctgtggggtaccccaagctggcattgggggaacctacccaggagcgctgaaggaggactctccttccccaggctgctttcagacagaggtccttggctttctacagggagcccagccaggctcacaataagccaggcctagcggaagagagcagtttttcttgctctgaggtttcaaaagggcttggtgaattttaaaaagctccaagacccacctggagctcactttcaaggtgcagctacagggcagtgtagagttgttgggctttgtgtctcaggaggagcatctctgcactctggagaagtatctggtggcgtcaaagccaggtctcaggagttggttttggggatgtgtccatcttggcttcccaagtgctccctgggctgccaggagccatcatctagggaattttccaggtcttacctgaaccccacatccaggcttacagggctttgagtcctcggtccagacagggtcagtccagcactgctggtcgcctgtgtagcacaggctcctgtctgccgtctccaggcccttgccatagcaacagggatgggcatttatgggccctgatggctcttactgagctcttcctgccacatcctgaggatgctagggctgcaactggggtggccctgtgcagtcacaaagcagggagtccggattggaggattcttacatgctggtgcccccagagcccctgcgtgtctgcgggggcctcccatgagagccaactcaattgtggaagacaaaccggaggggctgctgcccttctcagaacctgaaacctggaaccctatatgaatctgcatttctgatcagcccccattgtgggtctagggctaacggccatcagtgctttttctctgcttgaacaggtagaagcccccaaagttgtccattggccatgcccctgtgagggcatgagccagaagtgagggcagtttgtttttcagtgatacttcagagagggccatttgagatgggctctgaggtaagcataggagttcaccagacgcagaaggaggtcacaacctgggctgggttcagtaggtgggttccagattatccccaccccaacctgggctgggttcggcaagtggggtccaggctcctcactcccccttgctgctcttggttgacaggagagtaacaacatggtggtgcctgccatgcagctcgccagcaagatcccggacatgtcggtacagctgtggtcgtcagcactgctgagaggtgagtgcaatggccacccctcttccccagccccagcctggccctccccagagatcaaggctgctgggcatgtcctgctcagccttagctcggactaggcctccgtgggccgcagccccagttctagcatgggtagggggtgctcctcaggagaccctggttgagggcagtgggtgcatttgtggcatccgcttgactcggggtctggttcagtctctataggacacagaggctgcgacttggtatctggtagacttgggctgttagccgtggcgctctcagccttgcttcttcccggaaaggcagacagcagccatacctattgggtagggctggccagctagctctgggagcagggcgggcactcagcgggtatcattgctgttaccgcagctcccccatttccagattacgaaactaaggtccggagactcgcctggggccctggggaggtgacaggagacggggtgctccatgtgcagtgggctgcctggggctgctgcctcaggatgggcattgggcgtcctgccccaatgagcgcctgtttgcctgagggctggccatgggctccctggagggctggcgagaagcctggcattgggctttcactgcccagccagccctgttctgccctatgagggcggctggcgcatgggctttgtgatcccaagacagggctcaggtccagtgacgtgccaggcacccagagatccaccagtgcagctgggacttgaccttagggctccatctgcaccgagtgggagggcctgggcagtgacagggcaaggcgggcccccatgctcatgtcccactctcagacctgaataaagcctgtgggaacgccatggatgcccatgaagccgcccagatgcaccagaacttctcgcagcagctgctccaggaccacattgaggcctgcagcctccccgaacacaacctcatcacggtacgggtgtgggtgttaggggacgggatcaggactagcgggctccccacctgcaagaggaaggggcaccttggctgtatttctcttttgtccaacaaaccctaactcagcctcaggtgatcccttgatgggggagatggccatgggcacccccacccaagcaagggacccaggtgtctcctcggggcccattggactggggcatggagaacagagtcccggctgtgtgagcagcccaaggaaggcagcattccaacctcttcttccctgggaacggtccacagtgcctcactcgcatgtcctctcctccccacagtggacagacggtccaccccccgtgcagttccaagctcagaatggacccaacaccagcctggccagcctcctgtgaggccttgatggggccatccagctccgcagggcctgcgcgtctccggcttccacccagacggcactcaagcctgcccccgaggcgtgcttccttcctgattgtctctagagcttccaagtcctgggaatgtgcggggccagtccctgccctcccaggaggggtggtagccgttcccacctcgcagcaggacccccagtgcagaggctcacaggtggcacacaggcgctgtctctccagagccatccttcagagtggacctcagtgccagtcctgcctcagcatctgggtcacgtcggccaggagtagggtgcaggcctccagcaggtcctaatcctgtgtgccagggcaggcagtgccccaggggcaccacgcctgactctccatcacccaggccttgatgccgagcgggagtagagtgtttcctctgctcaaggcaatttccagagcccggatgccagtttctggcctgaatttggagggaagaagtaatggcgctagtgtgggacgaagcacagatcccagcacttttcccagctttctctccagcatcagtccctgcagcagctggggcctctggtcaggaaccctcagggacccaggaactcagcttccaaacatctgcaccttgaccggactcgccatcccgccgtgggggtgcaggtgattgtaaacacgggtgtgcatgtggatgcacacgggtgtgcggtgaagatctgtggagatggagctgggagctgaggctcctgttgcaccagccaccttcccccatcttgtggctgctgaggggcaggaagcgggggagtgggctcgtctcctaaatttaagatcacctcctcagctagcttagagtgcgtggcacgggccccccgcccccgagatctggagcccagggactttcttcctggcagatctgtggccttccctgctcagcctcttggtccccccactccctccaccgcctcaccttccctgctgggtctctggggcacagtgtgaaacccgcaccctagccaggccccagggagcctccgctgggcccagacagcagcgtttggttttatccacttttcttggataatcaggaggtgccccagtggtcacagtgtggcattccgagttggggcgggtggtcgggtcaagatagcagcagcaggtgtcagggctcaagacaccaccccctccagcttctggggcccaggagcctctccctgctacagggggtgggggtcctgctcagcagggtaggtggtggttttaggtcttgtcaccctcactcagtggaactgcctctgggagctttggcgtctgtgactaaagggacgctggattgctcaggtcagctgcttggggctcccaggctgggtgtgccttagccacaggcagggctgtcaataacccccttcctcactggccaccacctgacatcagcaccagtgacaggctggtcagagggcggggctggtgagggtttgtcctaagaggaccaccgccatctctgggtctccagggggagagcctggccctgtcctttgctacccagggctgcccccaggcccatgaagccaataggagagcgtgtggcactggcccacaaactgtccctgtcctgtcttcctcccgagccatggcctctgctagctccaccttgaaggagccccccacatcctcccctacatcccagagatgccaccacttgtgtctccacaatgtgctcctgcccacccgggttccgcactgtccgacccctgcacaccactcatgtcaccacggcgtgcatcatgttcatccccatctatttatttaagcctttctttgcttgtagggcattttgtatgtagagcagttgaaaacagaacctcagaacttaacatctgtcctgatgttaaagtgcttttcatgaccaccctgttatctatgtatatgtaaagttaaggatgagatcttaagtttacaattaaaaactcagtactcaatatttaatattctactcgagctttatggaagccaaatcatgtgcatgtgtgtgtgtgcgtgtgtgcaagctttgaacctccttccacagccgcatcttctcatgacacaaagcttttgataagtactttcctgtgggtcgctcagcgcctcatagcatctcattcaattgcaagaatagaggccagacacggtggcgcatgcctgtagtcccagctaactgggaggctgaggcaggaggatcacttgagcccaggagattgaggctgcagtgagcatgatcgcgacactgcactccagcctgggtgacggtgagactttgtctcaaaaaaaaaaaaaaaaacaatggaaggcagacagcaagtccctgaggacacatcacacagtgtcctgtagctaagtgtctaggaaaaaacaaaaactccaaacccttcagtggatgaggacaaggtcgcagaaaggcattctgttgacagatgaacagccgaaagctggccagaccctcctgtatgcctctgcccttgtcctgtgggttgagggggtctgaccaggaggccacctacagcaggaagtgaggctgccatgtttccttgagacacagctgcctctccccagctctgtccctgtagtcacctgccggtgggcgaggatcctctccctgggataagcactcccagccccgtttatcagaaacacaggcaaggaaattggaactgccacccagcccagcatggtggctcaattggttggttgcgttgtcagttgtctcttcgttttgttaaggtttttaataagtacgtttggcataatgtcttttaatgggtttgtaatatttgtaacggttttagcagcctataacttttcagctggtgcttttacttagggaaaaaaacaatttgtaaatacagaacattgtttaaaagacataaccatagaacatagcttcctgtttgtggattttgtttcctatatattcaaagtaaaatgacttacaggagccacgtgctgtgtctttgttgtttcctctgtccgctttgtgagccatcccaaagacggctgccacccttgctgccatgcccacaggggccccctctgtggcggggtcttcagcatgaggatgcagtccccaaatcctgagccagatgacgtgaatggaagcctgagtccccatctcctccactgatcattttcctctggtctggcctcgcctagagaggaaggaaccccatgctccatcagcatatgaggccttcagcagcctgctcctggaatcctcccttcccagccctctcaggggcagactccctcatgcacccaggtgtcctggtccctgtgtttttttttgttgttgttgttgtttgagatggagtcttgcactgtcgcccaggctggagtgcagaggcgcgatctctgctcactgcaacctccacctcccaggttcaagcgatactcctgcctcagcctcccaagtagctgggattacaggtgcccgccaccaagcccagctaattttttgtatttttagtaggaacagcatttcactgtgttggccaggctggtcttgaactcctgacctcgtgatccacctgccttggcatcccaaagtgctgggattacaggcctgagccaccgcgcccagccggtccctgcattcttagaggggaccagcctccatacacctgggagtgaggggagttatttgcccagatttttttgtttggaggtgaaattaccataacaaatttaactttttttgcaggttgtgctggcttacgcctgtaatcccagtactttgggaggccgaggcaggaggatcccttgagcccaggagttcaagaacagcctgggctacatagtgagacctagtctctacaaaaaatgtataaaaattagccaggcaaccaggtgccgtggctcaagccagtaatcccagcactttgggaagccgaggtgggcggatcacttaaggccaagagttgagaccagcctggccaccatagtgaaaccctgtctctactaaaaatacaaaaattagccgggtgtggtggcgtgcacttgtagtcccagctactcaggaggctgaggcaggagattcacttgcaccagggagtggagggtttcagtgacccaagatcctgatactgtgctccagcctgggtgacagagtaagactctctctctcaaaaaataaataaatacaaatacaaaatataaaaattagccggtatggtggcgcacaactgtaatcccagctactcgggaggctgaagcaggagaatcgcttgaacccggaggcagagtttgcaatgaaccaagatcacaccactgcctgggcgagagagggagactctacctcgaaaaaaaaaaatagccaggcatggtggtgtgttcctgtagtcccagttacttaggaggctgaggcgggaggattacttgaacccaggaggatattagcagagacagagtcttgctctattttatatgtatataaaatagtattatctgtaaagtggactgctcagtggtattcagtacgttcacagtgttgcacagttatcatctctatctagttctgggacattttcattcccccaaaaggagattcattgccatcagcagtcactcctcattcctcctccctccccaagcccctggcaactagtaatctgcttcctgtctgtgaatttgcctgttctggatattttatatcaatggaatctcataccctgtgacctcttgtagcctgggatctctcagcactatgttttcaaggttcatctgcactgtagcatggatcattgctttgttccttttatgagtgaataatatcccattatatggatggaccaaactgttgatcttttttttttttttttgagacagggtcttgctctgtcacccaggctggagtgcagtgggttgatctcggctcactgcaacctttgcttcctagggtcaagcaattctcctgcctcagtctcctgagtagctgggactacaggcgcataccaccaagcccagataatttttggatttttagtagagatgaggtttcaccatattagccaggctggtctcagacccctgaccttgtgatccacctgcctcggcctctcaaagcgctgggattacaagcataagccactgcacccggcttttttttttttttcttgagacaggatcttgctctatagcccagtgcagtggtatgatctcagctcactgcaacctccacctcccaggctcaagggatcctcccacctcagccccccaaatagctggaatgacaggcaccaccatgccaggctaatttttctatattttctagacatggggtttcaccttgttgcccaggctggtcttgaactcctggactcaagtgatctgcccgccttggcctcccaaagtgctgggattaccaccgtgaaccacggtgcccggccttatccatccttttatggacattcgggttgcttcccccttgtggcgactgtgaatagtgctgctctgtgagttttggctggaccacgtgttttcaattctcctgggctttccctgtgtctttattgtggacagacagggccgctcagcacacacatatggtgtgaaggccctcatgtcactctcaggttagttccccatgagagatacacaagccatcttagcctcgagccccaaggggctctgctggatgtgcaacgtttttgtattttgttttgctatgtgtcgtttagagacagagtctcactctgttgcccgggcaggagtgcagtggtgcaatcacttgagcctcactgcagcctcaaacgccctggcccaagcgaccctcctgcctcatcctcctgtgtagctgggactatagatacgtgccaccacacccggttaattttttttttttttttgagatggagtcttgcactgttgcccgggctggagtgcagtggtgtgatctcggctcactgcaacctctgcctcccagattcaagagattctcctgcctcagcctcccgagtagctgggattacaggcacctgcctccattcccagctaatttttttgtattttttagtagacacagggtttcaccatgttggccaggctggtctccaactcctgagctcaagcaatcctcccaccttggactcccaaagtgctgggattacagtcgtgagacaccacaccggccctgtgcgagtgtttgagtctcaacatggtgatcacagcaccccaaccatcgatgcctgggctccttctgccccatccccaccagttcagcaccaggcagccttttcactcaaggtagactctgcttatccttcatcatcagcttggacatcatcttctccagacagacaggcaggggcccatctggcccatctcatacctctccagcccctgcatgggattcacatcttgaacctgagctggaccagagcacagcatgacgagcctgccatgggaccagccacctttccagcaggtgtgcagcccccagctgggaggtgtgaacctgcatgtggacagcaggtctatcctgggttgaccaatgtttcacacaaagcctacacccaggcagtcaccttggcctgggcgcccggcagactagggtcacacagctcctcctgttgagtcatttccgagtaggctatgccctgtgcagcatccatgggaccctgactcaggaagtgagtgaccttccttttcccacaagccatgtcctcatccatgtcatccctcatccacttagaggatgaggcgggagggaggttgaggcaggaggatcgcttgagcccaggaggttgaggctgcagcaagctatgatcgccccactgcactccagcctgggtgacagagtgagacccgctctctaaacaaaacatagtgaaacaaaaaacaaatgatagaagccagatgtggtggagcatacctgtagtcccagctccttaggaggctgagatgggatgatggttcaggtccaaaagtttgagactagcctgggcaacgtagcaagaccccgtctctataaaaaataaaacatctgcctgtaatcccagtactttgggaggccgaggcaggcgtatcacttgaggccaggagtttgagaccaacctgggcaacgtagcaagactttgtctctataaaaaatttaaaatcagctggacgtggtggctcatgtctgtaatcccaccatgttgggaggccgaggcaggtggatcacctgaggtcgcgagttcaagaccaatgtggccaacatagcgaaacacagtctctactaaaaatacaaaaatcagctgggtgtggtgctgcacgcctctaatcccagctacttggaggctgaggcagaagacagtgaccccaggaggcagaggtggcagtgagccaagatggcaccattgtactccagcctgggtgatggagtgagactccatctcaaaaaaaaaaaaaaattaaaatcagccaggcatggtgcctcacgcctgtaatcccagcactttgggaggccaaggcagggagatcatttgaggtcagcagttttttttgttttgttttgttttgtttttgttttgttttgttttgtttttgagatggagtctcgctctgtcgcccaggctggagtgcagtggcgcgatctcagctcactgcaagctctgcctcctgggttcacgccattctcctgcctcagcctccttagtagctgggactacaggcgcccgccaccgcgcccagctaattgtttgtatttttagtagagatggggtttcaccgtggtctccatctcctgacctcgtgatccgcccgcctcggcctcccaaagtgctgggattacaggcatgagccactgcgcccggccgaggtcaggagtttgagaccagcctgaccaacatagtgaaaccctgtctctactaaaatataaaaattagccagccgtggtagcgggtgcctgtaatctcagctactcgggaggctggggcaggagaatcgcttgaacccaggaggcagaagttgcagtgagccaagatcacgccactgcagtccagcctgggcaacagggcaagactccctctcaaaaataaataaacctggcagggcgaggtggctcacacctgtaatcccagcactttggggggccaaggcagatggatcacctaagctcaggagtttgagaccagcctggccaacatggtgaaatcccatctctactaaaaatacaaaaaaattagccgggcatggtggtgggcacctgtaaatcctagctactcaggagactgaggcatgagaatcgcttgaatccgggaggttggaggttgtggtgagctgagatcaggccactgccctccagcctggaccacagagtgagattccatctaaaaaaaagtaataataaaataaataaaaataaaaataaaataatgcaaaaattagccagccacggtggtgcacacctgtaatcccagatacgtgggaggctgaggcaggagaatcacttgaatccaggaggtggaggttgcagtaagccaagatcacgccactgcagtccagcctggttgacagagctagactccctctcgaaaaaacaaaaaaaacacttttttttttaaatttaaaattgccaggcggccgggcatggtggctcatgcctataatcccagcactttgggaggccgaggcaggtggatcacctgaggtcaggagttcgagaccagcctggccaacatggtgaaaccccgtctctactaaaaatacaaaaattagcagggcttggtggtgggtgcctgtaatcccagctactcaggaggcttgggcaggataatcacttgaatctgggtggcagagctgagatcgcgccgctgcactccagcctgggtgacagagcgagactccgtctcaaaaaacaaaaaaaaaaattgctaggcatagtggtgtgtgcctatagtcccagctactcaggagtctgaggtggaaggattgcttcagcctgggaggtcgaggctgcagtgagccacgattgcagctctgcaatccagtctgagcaacagagtgagaaccggtctctaaaaataataataaaaataaaaaagaaaatggacaactttcttttgaacacagcttctagaacccagcacctgaggaaatatacgcaggcagaaatcctcgcagtggccacctcacatcctgtctcctcctattccggctgctttgacaaattaccatagactgaggggcttacaaacaacaaatacttatttcttactgatctagaggctgggaaattcaaaatcaaggtgccagcagattcggagtctggcgagggcctgcttcctggtttgcttcccgctctctagctccaccctcatgacataatcatctcccagaggccccacctccaaaatacaatcacaggctgggtgcagtggctcacgactgtaatcccaaaactttgggaggccaagacaggagaatcacttgagctcaggagttcaagagcagcctgggcaacatggtgacaccctgtctgtacaaaaaatacaaaaaaattagccgggcatggtggtgcgcacccatagtcccatctactggggaagctgaggcagaggatcacttgagcccaggagttcaaggctggagtgagccatgatcccaccacggcattccagcctgagcgacagatcaagaccctgtctgaaaaataaataaaaaacagaggaccgagcgcaatggctcacgcctgtaatcccagcactttgggaggccaaggtgggcagatcatgacgtcaggagatggagaccatcctggctaacacggtgaaactccgtctctactaaaaatacaaaaaattagccggccctcgtggcggcagagcttgcagtgagccgagatcatgccactgcactccagcctgggtgacagagtgagactcagttaaaaaaaaaaaaaagaaaaaacaggccaggcgcggtggctcacacctgagctgagatcgtgctgttgcactccagcctgggtgacaacagcgagactccgtctcaaaaaaaaaaaaaaatacaatcacatttcaacataagaatattgaaagaggagggacacggtggctcatgcctgaatcccagcactttgggaagccaaggcgggaagactacttgaggtcaggagttcaagaccagcctagccaacatggtaaaactccatctctactaaaaatacaaaaattagccaggtgtggtgacaggagcctgtaatcccagcactttgggatgcctaggtgggcgaatcacctgaggtcaggagttccagatcagcctggtgaacatggtgaaacctcatctctactaaaaatacaaaaattagctgggtgtagtggcaggtgcttgtattcccagctactcgggaggctgaggcaggagaattgcttgaacctgggaagcggaggttgcagtgagccgagatctcaccattgcactccaacctgggtgacaagagggaaactccacctcaaaataaataaataaataaataaataagatgaagtttcttatttcgtcccaaatttatgctcacatggtgagattacaatgaaattggctgggaaaggaaaggaaaaggttaatttccacatgaattttattttcttagtactctgatttttttgattttttttatttttattttttttttttgagatggagtttcgctggttgcccaggctggaatgcaatggtgcaatctcagcttacagcaacctctgcttcccaggttcaagcgattctcctgcctcagcttcctgagtagctgggattacaggcgcacaccaccacgcccagctaattattttgtacttttagtggagatgtggtttcaccatgttggccaggctggtctggaactcctgacctcaggtgatccacccgcctcggcttcccaaagtgctgggattacaggtgtgagtcactatgcccggccagggatagtccactttgtcagtgtgtgtttgttgtgaacgtcgtctctaaccacagttccttacactcagtgtttctgcagcgcagggttcaggctccatctgcagttaggcacactctgtccagagtgagtctctgtgtggccttggcgctgtcctgctattccagggttctgagcacaaatcctcccctaaagggttaagcacaaactgttcagaagtcctgtcgtgaaccggaagtgtatctcccactctgtcttcatctgcaagtgtcctcagttgctactggcggcccctggcctgctctggccttggccaccagggggcatggtggcccaggagcagcaagggctgcccaggcaatgtccccaccaggtaggacaggtgggaacctacaatccagctagaaagactgggctggatgttgccagaccccagtctggccaggctttgctcatctgcagggatgtggggtgaccttcacaccactcctgtaactgttggagaagacaatggccagggttctccgggcgtcagggtgacaccattccctcctttacttgccaaacatgtattaagcacctactgtgcgctggatgctgggaacacagcagagaccacatcagacaatgtctgatgccctcagagggtggacatagttcccctgatgacgggtttcagaagggagggagtgttgaccatctgtgagaagggagtgtcgcacagtaggtgggggacaaccacaggggaggaggtgggggacgctgtgacaagaccaaaaggagggctgggagcgatggttcatgcctataattccagcactttgggaggccgaggtgggcagatcacctgatgtcaggagtttgagaccagcctgcccaacatggtgaaaccctgtctctacttaaaatacaaaaaattagccaggcatggtcgtgggcgcctgtaatcccagctactcaggaggctgaggcaggagaattgcttgaacctgggaggtggaagttgcagtgagccaaggtcacgccattgcacacagcctgggcaacaagagcaaaactccgtctcaaaaaaaaaaaaaaggaggcaagcaggccccccttgggccagctgatcagagctggacaacattccagcttcggcgatggggccaccaagacccaggcatctggggaattgtgtcccctactggcacagttgagtgactcgggtggggactgcaggctctggtcctggtcccctcctgtctggccacccctcaggggacactgggagggtatcgcggctaccaggctgcctgtcgcatttatggagggccagtccaccaccaccttgtactcagctgacatctggaagcacatccaggaggacactgaaggctcagaaagtgcctgggcccctgtgttcaggtgtgaaatcaaatctctgaggccccagaccagagccatcatccttctgcccccactggactgagactcacatgcccagaactgcacttgtggatgatggtggtacatccagggcagaatacacggcagacaggtcagctgatgacagtgtctgctggccagggtcagtccctgactctcttgtataatgtgtaacccaacagcgcgtgcccagggggctggggcactccagacaccggcccaggccctggcttgactcaggcctgaccctaaaggaacccgagtaagtgtctcagagccgggtcctggatccaaatgcccctaatacttcacacaccggccaccatgctgcttcctgagcaacctgctccccaggaaaagtgacctaatcactccaggctgttcttctccggagcatcctctggtacccaccgaaggaagtgacccctgagtcctactcagctcctccactcacgggatttttttttcttggcaactagttctccctatacccaaaacctatatgacaagaggatcctttttattaaaaaaatttttttgccaagtgcggcaaaaaatcccagcacaggccgggcacggtggctcacgcctataatcccagcactttaggaggccgaggcgggtggatcacgagctcagaaggtcgagaccatcctggctaacacggtgacaccccatctctactaaaaatacaaaaaattagccgggcgtggtggtgggcacctgtggtcccagctactcaggaggctgaggcaggagaatggtgtgaacccgggaggcggagcttgcagtgaggcaaggtcacgccactgcactccagcctgggcgacagagcgagactctgtctcagaaaaaaaaaaaaaaaatcccagcacttcgggagtctgtaatcccagcactttgggaggccaagagtttgagaccagcatagccaacatggtgaaaccccgtctctactaaaaatacaaaaattgggcacggtggctcacacctataatcccagcaattttcgaggccaaggcgggtggatcacctgaggtcaggagttccagaccagcctggacaacatggtgaaaccccatctctacaaaaaatacaaaaattagccgggcattggtggtttgtgcctgtagttccagctacttgggagactaaggctggagaatcacttaaacctgggaggtggaagttgcagcaagccaagattgcaccactgcactacagcctgggcgaagagtgagaatctgtctcaaaaaaaaaatttttttctctttggtcatgtgcggtagctcacgcctgtaatcccagcactttgggaggccaaggcaggtggatcacttgaggtcaggagttccagaccagcctggccaacatggtgaaactcccgtctctactaaaaatacaaaaatcagctggatgtggtggtgggcacctgtaatcccagctacttgggagactgaggcatgaaaatagtttgaacctgggaggcagagattgcagtgagctaggatcatgccactgcactccagcctgggagacagaaagaaattctgtcttaaaaaaaaaaaaaggggggggtggcaggcgcagtggcttacgcctgtaatcccagcactttgggaggctgagacaggcggatcacatgaggtcaggagttcgagaccagcctggccaacatggtgaaaaccctgtctctactaaaaacacaaaaaattagccaggcgtagtggtgggtgcctataattccagctactcaggaggttgacgcaggagaattgcttgaacccgggaggtggaggttgcggtgagccgagatcgcaccattgcactccagcctgggcaacaagagcaaaactctgtctcaaaaaaaaaaattttttttttttggccagcgtcaatggctcatacctgtaatcccatcactttgggaggccgaggcaggaggatcacttgagcccagaagtttcagaccagcctggcaacatgatgggaccctatctctacataaaatttaaaaattcaccaggtgcaattaggcctggtccccctcctctctggccactccaatctaaagtcaaattgaaaaaaaatgttggggctgggtacggtggctcacgtctataatcccagcactgtaggaggccgaggcgggtggatcacttgaggttaggagtttgagaccagcctggccaacatggcgaaatcccatctctactaaaaatgcaaaaattagccaggtgtggtggcgggtgcctgtagtaccaggtgctcaggaggctgaggcacgagaatctcttgaacctggaaggtggagattgcagtgagccaagattgtgccactgcactccagcctgggcaacagggcgagactctgtctcaaaataaataaataaatagataaataaataaataaaaataaaataatttttgtgtgtggagacagggtcttactctatttctcaggatgaagtgcagtggcatgatgtagccaggaactggagcttcaaactcccaggcccaagcaatcctccctcctcaacctcccaagtagcttggaccataggcaggtgccatcactcccagctaattttttaattaatttatttatttttgttgttgttgttgtttgtttgttttgagacggagtctcactgtcgcccaggctggagtgcagcagcgcaatctcagctcactgcaacctccacctcccaggttcaagtgattctcctgcctcagcctcctgagtagctgggactataggccctcaccgccgagcccggctaattttttttgtatttttagtagagacggggtttcaccatgtgggccaggatggtctagatagaactcttgacctcgtgatctacccgcctcagcctcccaaagtgctgggattacaggtgtgagccaccacgcccagccttattttaattttttattgagacagggtctcactatgttacccacgctggtcctgaactcctggcttcaagcaatcctgcctcagcctccaaaagtgctgggattccagccctgagccactgttcctcgctgaaggggattctttttcagggcattctttgtgacacactccttccctgggtgtgtcctggaatgtccgctggccacacccaggcctggtctggctgtggggacacccacatgcattgtcagccgggtacgagaccggggtgggctttgcacacagatcccacgactgtatacactcagccccgtgacaggaactgtagcccatggccacagcatctcttgctagaaactttttcaagaaacttacctcagtactcaaagccactgcggtcagcaagtgctgaacatgccccaatccctaacctcagaaaaggacactttctcttaactcctgtgtaaagggtcaggactggtgtctggctgccgaagaaactaaacatccagcttcgctttcccaggtaacatttgctgtatcatctgtgatgcaggagatggcaatggtattattattattattattattattatttttggaaatggagtctcgcgctgttatactgttgcccaggctggagtacacaggtgcgatctcggctcactgcaacctccgcctcccacgctcatgtgattctcctgcctcagcctcccaagtagctgggactacaggcacccagcaccacacctggctaatttttgtatttttggtagagacagggtttcaccatgttggccaggctggactcaaactcctgacttcaagtgatcctcctgccctggcctcccaaaacgctgggattataggcgtgagccactatgcctgtccggcaatggcattttgaccaatacaacatgggcatctaactagaattggggacacccacacgggtcataatttggggccaaagtagagttttttttgtttttgttttttttttggtagcgatgaggtctcactatgttgcccaggcagttctcaaactcctgggctcaagcgatcctcccacctcagcctctcaaaaggctgggattacaggcataagccaccgtgcccagcaacatttttaactctttttttttagagaaagggttttgctctgtcacccaggctggagtgcagtggcacaattgtagcctactgcagcctcggcttcctgggctcaagggatcctccagtctcagcctccagagtagttaggactgcaaatgcacaccaccacacttagacagtttttaattaattaattaattaattttgagacagagtctcactctgtcacccaggctggagtgtagtggtgtgatctctgctcattgcaactccccatcccagattcaagtgattctcctgcctcagcctccagagtatctgggattgcagacacatgccaccacgcctggctaatttttgtattaatatttttagtagaaatggagttttgccatgttggtcaggttggtcttaaactcctgtcctcaaatgatccatctaccttagcctcccaaagtgctgggattacaggggtaagccaccatgtccagccaatttttaaattattttttgtacagatggagtcttgctttgttgcccaggctggtctcaaactcctggcctcaagcgatcctcctgcctcagcctcccaaattgttggggggttacaggcatgagctactgtgcctgacctggaagtggattttgaagtggattttgcagcctgtttgtgtctcccaagccacaaaagactctgaccttcgtgtttgaccagttccttggaaggcaccagtctgtgtattaagtggattatccaaacccagactgactcctggcacatggaagatgctttgggatacacttatactaaaagggtattcattcgtgactgatctgaaatccaaatctaatggggcatcctatattttcacttgctaaatgtggccaccctagatgctcaatgacatccttgaataaaggaagctgatgaagttcaaacaaataattttaccagcggggtaaaaaaagctcaaagctcagtgcactttgcgaaacagtcatttcctcttccggtcagaataaactcctgactcctcccaggcccaagtgatcagccactccctcctaccagctggctgggctgctgtgctcagtcccaactcaggaaggacaagagtagctcctgtgaccataatgcctgtccacaagctgaggccccaccccactccgcctccttttctttttctttgaaatggagtcttggtctttttgcccaggctagagtgcagtggcgtgatctcggctcactgcaacctccacctcccaggctcaagcgattctcctgcctcagcctcccaaacagctgggattacaggcatgcaccaccacccccagctaatttttgtatttttagtagagacagggttttcaccatgttggtgaggctggtctcaaactcctgacctcatgatccacctgcctcggcctcccaaagtgctgggattacaggcgtgagccaccgtgcctggccacccccttgctttttagacacaaggtcttgctctgtcacccaggctggagtgcagtggcataatcttggctcactgcagccttaaaactcctcaagtgatcttctgtctcagcctcccaagtagttaggactatgggtgcgtgccaccaacgcgcctggcactgagacctggatttttttttttttttttttggtgagatagagtcttgctccgtcgcccaggctggagtgcagtggggtgatcttggctcactgcaacctccgccttccaggttcaagcgattctcctgcttcagcctcccaagtagctgggactacaggcgcccgccaccatgcccagctaatttgtgtatttttagtagagacagggtttcgctatgttggccaggccggtcttgaactcctgacctcgtaatctgcctgcctcggcctcccaaagtgctgggattacaggcgtgagccaccactcccggcctgagacctggatcttaaaaagggctcagctgggtgtagtcacacacctgtagttccagtgacttgggaggctgatataggaggctagcttgaagcccaggagttcaaagtgagactagcaacataatgagacctcatctcttttttttttttttttttttttttttgagacggagtcttactctgtcgcccaggctggagtgcagtagtgccatcttggctcactgcaagctccgcctcctgggttcatgcctttctcctgcctcagcctcccaagtagctgggactacaggcgccctccaccacgcccggctaattttttgtatttttagtagagacagggtttcaccatgttagccaggatggtctcaatctcctgatctcgtgatctgcccacctcgacctcccaaagtgctgggattacaggcgtgagccaccgtgcctggccgagacctcatctctttaaaaaataataataataaagttggctgagtgtggtggctcacgcttgtaatcccaacattttgggaagccgaggtgagaggattgcttgggcccaggagttcaagggcagcctggcgaacataataagactcccatctctacaaaaaaacttaaaaattagctaggcgtggtggcctgcacctgcagtcccaggtattcgggaggctgaggtgggaggatcgcttgagctggggaggttgaggctgcagtgagctgtgatcatgccactgcactccagcctcagcaacagagcaagaccctgtctctaaaatcagaaagaaaggaagaaaaggcaaaaagaggggaaaagaagccaagagaaaggcttgaaatgcatgtggatgaaagccctgacctgtattttaggctcagttacactcagatgtaactgtgtgtctgggatgcaaaagagctcagatcctacagaatctcaaggtgaattcttttccctgagtagcataaggcatctttttcccatctaacactgggttgggctcctcccttctgtatgcaaagtggccacaagtgcccaaaatgaactccctccagttcagaaatgcattccttcctggttagggaagtcactgttttgacttagaagtcttctatacttcaggcgtctagtgtctacctaataccttttgcctcagaaaagggtctaatcccacttaattacaagaagatttgctgttaggtttttgacctagagatctaaaaaggcctggctgaaagagttcctgagctccatctggacttaattccagattttctagccaaccaacactaataaagctatactctgctccccacctctgtataattcaggtgctacctgactttctctggtgaagcagcaggagtatttaggccaacctgttggtttggctgtgtctgtttctctctggaaatagacaatgactttttcttttttttttcttgtttttgagacagagtctcactctatcgcccaggctggagtgtaatggcacactcttggctcactgcaacctctgcctcccaggttcaagtgattctcctgcctcagcctcctgagtagctgggattacaggcgcctgccaccgctcctggctaatttttgttttatttatttatttatttatttatttatttatttatttactgagacggagtctcgctgtctcccaggctggatgcagtggctcaatcttggctcactgcaagttccaccttgccaggttcacgccattctcctgcctcagcctcccaagtagctgggactacaggcgcccgtaatttttgtatttttagtagagacagggtttcgccatgttggcaggctggtctagaaatcctgacctcaggtgatgcgcctgcttcggcctcccaaagtggagggattacaggcgtgagccactgctcccagagagtatctcattcttaacagttctttaactgttatcaaaatattggtctcaaagtactttaaggcaccgaaatgaggcacacataaacatatcatcaacacgctgaaatgtcatgaaaaaaattatactgagagacgtatataaaataagattttttttcttttctttttttttttttgagacagagtcttgctctgtagcccaggctggagtgcagtggcgcaatctcagctcactgcaagctccgcctctccggttcgcaccattctcctgcctcagcctctggagtagctgggactacaggcccccgccaccacgctctgctaactctttttttgtatttttagtagagatggggtttcaccgtgttagtcaggatggtctcgatctcctgacctcatgatccgcccgcctcagcctcccacagtgctgggattacaggcgtgagccaccgctcccgacccaagattatttttttaaactgaaaaaatgtatagtaattagccaataaaccagaatctgtaacattagatatatatatatatatatatatatatatatatatatttttttttttttttttttttttttttttcctgaggcggagttttgctctgttgccaggctgcagtgcagtggtgcgatctcggctcacggcaacctctgcctcctggtttcaagtgattctcctgcctcagcctcccaagtagctgggactacaggcacgcgccaagaccagctacttttttttttttttgagacgaagttttgcgttttgctcttgttgcccaggctaggagtgcaatggcgtgatctccgctcattgcaacctctgcctcccgggttcaagcgattctcctgcctcagcctcccgtgtagctgggattataggcaagtgccaccatgcccggctaattttatatatatttttttaatagagacagggtttctccatgttggtcaggctgatcttgaactcccgacctcaggtgataggcccacctcagcctcccaaagtgctgggattacaagcatgagccaccgtgcccggccaatttttgtatttttagtagagacagttttcactatgttggccaggatggtctcaatctcttgacctaatgatctgccggcctcagcctctcaaagtgctggggttacaggcgtaagccaccgcatcctgcctagacactgactttttcaacacattttccctggaagaaccaagaccaattctgatgggcttcccaaaggatgcaggttgtaatggattaacagttaacatatgtgaacctgaaagtgcttggcaaatccaaataaatatgttttcttttttggggtatggggggacagggtctcactctggccaggctggagtgtagtggcactatcatagctcactgcagcctcaaattcctggactcacgtgatctccctgcctcagcctcctgaatagctgagactacagacatgcaccaccacgcccagctaaattttttattttttgtggagacaaagtctcaccatgttgcccaggctggtctcgaactcccaggctcaagcaattttaaagtgctaggattacaggtgtgagtagctgcacccagccccaaatgaattatgcagtccaataatcttagggggtaatgatggagggcaccttgctttgtgcacctgaaccgccactgtcattgacaccagagtgctttagctcttctgcttattacccttcccactggtattaattagccatcattcctcattgccagtgggcactgcttcctttgtccaagggtacagcatcaacaggaggtctcacaggctagcaccagggaaccctcacttttctagctaccactgaggctccgcctcccttgtctcttgtggagtggcctggctccgttcccatttccctatttggatgtgaatgtcacttagccagtttgcccacatgatttcccagagccaggaagggaaacgccttggtgcagagatgcaatcacggctaccaccaaggaaaagaaggcacatccttggcgattctgtcacgtggtatctctttcttctttctttcttttttttttttgttgttgttgttcttgtaggttgtttggtctgtttggtttgtttttgagaaggagttttgctcttgtcgcccaggctggagtgcaatggtgcgatctcggctcactgcaacctccttctcccgggttctagtgattctcctgcctcaatctcctgagtagctgggattacaggtgcctgccaccacgcccagctaattttttgtttgttttgagacggagtctgggtctgtcgcccaagctggagtgcagtggcgccatctcggctcactgcaagctccgcctcctgggttcaccccattctcctgcctcagcctcctgagtagctgggactacaggcgcccgacaccacgcccggctaattttttgtagttttagtaaagacggggtttcactatgttagccaggatggtctcgatctcctgaccttgtgatccgcccgcctcggcctcccaaagtgctaggattataggcatgagccaccgcgcccggcagatgcctggctaatttttgtatttttagtggagatggggtttcatcatgttggccaggctggtcttgagctcctgacctcaggtgatccatctgcctcggcctctcaaagtgctgggattacaggcatgaggccctgcacccggccacttacagctgaatcctaaacttgtattgtctgaatctaaaattgggcccatgtgcaggaatggtgacatgaagggaggcgaggtctaagccctgttgagtccttgtgcaaagcggaaccatattaagaacctaaaacttaatatgttaatatgagtgcagtggctcacgcctgtaatcccagcactttggaaggccaaggcaggcggatcacgaggtcacgagttcaagactagcttggccaacattgggaaaccccgtctctactaaaaatacaaaaattaggttcatgcctgtaatcccagctactaaggaggctgaggcaagagaatcgttttaacctgggaagcagaggctgcagtgagccgagagcacatgattgcactccagcctgggtgatagtgagagactgcgactcaaaaaaacaaaaaggtcgggcgtggtggctcacacctgtaatcccagcactttgggaggctgaggcaggcagatcatgaggtcaggagttcaagaccagcctggccaacatgatgaaacctcatctctactaaaagtacaaaaaattatctgggtgtggtggcgagtgtctgtaatcacagctactcgggaggctgaggcagaagaatcgcttgaacctgggaggcagaggttgcagtgagctgagattgcgacattgtactccagcctgggcaacaagagcgaaactccgtctcaaaaaaaaaaataataataataattagccgggtgtggtggcatgtgcctgtagtcccagctgcttgagaggctgaggcacgagaatcgcctgaacctgggagacagagaatgcagtgagctgagacatgacactgcactccagcctgggcaacagaatgatattctgtttccaaaaaaaaaaaaaaaaaaacaaatcagaacatcagtctctaaggattgcactgagaattgtgagctcaaagtgtccacagtgcctggtacacagtagaacacagaaaatttcagtttcattccagtctctgggattctttctgagagcaggaatttaaccttattcatttaagtaatccctcagtgctctgcacatgactttactttatagttgttgaattgaaccaggatcaaagagcagctcattgtccagcctcttcacttcatacatgagaaactgagcagcacagagggcaactgtaactcatccacatcccacttgtttgtttttttgtttgtttgtttgtttgtttttgatacggagtctctctctgttgcccaggctggagtgcaggggtgcgatcttggctcactgcaacctctgcctcccaggttcaagcgattctcctgcctcagcctccggagtagctgggactacaggcatgtgccaggacgcctggctaattttttgtatttttagtagagatggggtttcaccatgttaaccaggacggtctcaatctcctaacctcatgatccgcctgcctcgggctcccaaagttctgagattacaggcgtgagccaccacatccggccatcccacttgtattttatggctggatctttttttttcctgagatggagtttcactcttgttgcccacgctggagtgcaatggcgcgatctcggctcactaaaacctccagggtagctgggattcccagcttcccgagtaggtgggattacaggcacatgccaccacgtttggctaattttgtatttttagcagagacagggtttctccatgttagtcaacctggtcttgaattcccaacctcaggtgatccgcccgcctcggcttcctaaagtgttggaattacaggcatgagccaccatgcccagcctttcttttttttcctgagacatagtcttgctctgtcgcccagagctgaagtgcaatgatacgatattggctcactgcaacctccacctcccgggttcaagcaattctcctgcctcagcctcctgagtagctgggattttaggtacctgcaccatccccgtctaatttttgtatttttagtagagacggggtttcaccttgttggtcaggctggtctcaaactcctgacctcaggtgatctacccacctcggcctcccaaagtgtcaggattaccggtatgagccaccgtgcctggccactaattttattttatttttttgtagagagggggtcccggtatgttgcccaggtgagtctcaaattcctgggctcaattctcccaccctggcctcccaaagtggtacaattgcaggtatgagccctgatttcttatatggtaaagacagtaactggcctctctagggactggcaggtgtgggttcgaccccagctctgccaaccaccaaagtccaagtgtttattgtccacctggactgcctcagacacttgcaggatgtggtaagtactatgacacaggtgcacagaaggtgctctgggaacagcttgtcttcatgtttacaatggcttctttccctagccaaggactctatcagccttgccacttggggacaggttgagctcgctcagggagtcaggccccacagggctccctgccaacctcccatcattgtgattgaatttattctttatttttcttccaggaacatcagcgcacttgtaacaataataatcatcttttctactgggtatactgtttcatggtttacaaagcactttcacatccattatctcatttaatcacttcctcctctacattcctacaacagtttcttggtacctcttcagtataatattctgcctggtataacaagcctatttccctttactgcatttatttttactcacaagttccagcatataattcaggcatctttgcaccttggacacttctgtgtacaaagtaagcacaataaaagtttgacatgccagtcacagcagccttcgaccacagtaccagctacttgggaggttgaggcaggaggattgcttgagctcaggagtttgagtccagcctgggcaacatagcaagaccctgtctcttcgaaaaagtttgccggctgggcctgctggctcacgcctgcaatccgagcactttgggaggtcgaggtgggcggatcacttgaggtcagaagttcaagaccagcctggccaatatggtgaaaccccatctctactaaaaatacaaaaaaattagccgggcattgtggtgtgtgcctgtaatcccagctactcaggaggctgaggcaggagaattgcttgaacctgggaggcggaggttgcagtgagccgagatcgtgccactgcactccagcctgggcaacagagaaagactccatctcaaataaaaaaaaaaagaagtttgccatattgaatcatcagtgttgcaggtctttctcattcattactgccatcttcactcctttcattcaatgggattgcctactaaggacaaagctgggttctttggaggggaaatgaggcaagaagttcagaatcaagtgaagggggaagacacaagtgaaggccctgatccctggtaggccacagtacatgcttcatgctttagcagcggtgcaaacacagttggggctgggcacggtgactcacacctgtaattctagcgcattggaaggtaattcggccacactgggaggctgaggcgggagaattgcttgatgccaggagtttgagaccagcccaggcaacagaaggagaccttctgttttaaattttttttttttaatgtaaaaacttaggttgccaggcgcggcggctcacacctgtaatcctagcactttgggaagctgaggggggcagatcacgaggtcaggagtctgagaccagcctggccaacatggtggaaccccatctctactaaaaatacaaaaattacccaggcgtggtggcacgcgcctgtaatcccagctactcaggaggctgaagcaggagaatcgcttgaatctgggaggcggaggttgcagtgagccaagatcacccccctgcactccagcctgggcgacagagcaagactccatctcacaagacaaaacaaaacaaaacaaacaaaaaaacccctaggtcttgtggcatgcactagcggtaccagctactcaggggctgagtcaggaggatcacctaagcccaaggaatggaggttccatcatgatcttgccactgtactccagcctgggtgacagagcaaaatcctgtctcaaagaaccaacaaacaaaaagaaaaaaaaatactcttgcttcccagagtttggggtgactttttttttttaagacagggtctcactgtgtcacctaggctggagtgcagtggtgcgatcatggctcactgcagccttgacctcccaggctcaggtgattcttcaagagtttggggtgactgattttatctgggggtgactgtgaagcaggaatgcttcttggaaggatcttactcagcagagaaggaaactgcagggctgaagaggcaaacgggacacatttgggaagggccacaaatgtgtcccttgggaaaaagtggacagctgcatggaaaaattctcctcaaaaagaataggaggctgggcgcggtggctcacacctgtaattctagcactttgagaggccgaggcgggtggatcacttgaggtcaggagttcaagaccagcctggccaacatggtgaaaccctgtctctactaaaaatacaaaaattagcttggtgtggtggcgcatgcctgtaatccgagctgctctggaggctgaggcaggagaatggcttgaacctgggaggcggagatggcaagatagtgccactgcacaacagagtgagactgtgtcaaaaaaaaaaaaaaaaaaagggaaagggggcaaaatgggctgcttttctttcgttttcttttttttttgagagggagtctccctctgtcgcccaggctggagtgcagtggcgccatctccgctcactgcaagctccgcctcccgagttcacgccattctcctgcctcagcctcctgagtagcttggactacaggcgcccgccaccacacctggctaattttttgtatttttagtagagacggggtttcactgtgttagccaggatggtctcgatcttttggcctcgtgatccgcccgcctcagcctcccaaaatgctgggattacaggcgtgaaccaccgcgcccggcctgggttgcttttctaaaaaggtctaactcaccgcattgtcctagggctgaggcgtcagaaagtcgaagtttcaggaaaaggggaccccttcctcccacactcagatgctgcttagaaaagcacatggagcacaactccctcgcatttttctttttctttctttctttttgagacggagtctcactgtcatccaggctggagtgcagtggtggatctcggcgcactgcaacctgcctcccaggttcaagcggttctcctgcctcagcctcccgagtagctgggactataggcgcccactaccacgcccggctaatttttgtatttttagtaaagacagggtttcaccatcttggccagactggtctcgaactcctgacctcaggtgatccgcccacctcggcttcccaaagtgctgggatacaagcgtgagccaccgcgcccgataactttcttttttcttttttttgagacagggtctcgctctgtcgcccaggctggagtgcagtggcacgatcttggctcactgcagcctcgacctctcggttcaaacgatcctcccacctcagcctccggagtagctgggactacaggtgtgcgccaccacccctgctgattttttcattttgattttaatttttgtagagacaggattttgccatgttgcccaggctggtctgaaactcctgggctcaatcgaccctccagtctcaaccttccaaagtgctgggattccaggcgtgagccaccgcgcccggtcgcatttccttagtaaaggggtgaggggcgcccatctcctgccatccttctctggagagaggcgaggtgcttgaagtcccaaattcctcgtgtagtgagaaaacaggggaggcagaaaatccccaagatatcttcagaaacgaaggtggaggggggcgcgcagccctcactttcctcagataaaggagggacagggagagcggcccccaagagtgcttagaaaaggagtgtatgtgccccaaatattcctcggaaaaggcggtggaccctggattctccaaatgctccttagggatcccgaactcccatgttttcttaggaaacagagctggggtcccgaatctacaacataatcgtgatcccggcaattgtcctcagaaaaccgggcagggcaagaaacccccaaactctctcagaagaggggtcggggcaagatttccgaagatcctcctcagaacgggggccagggaaaagaatcccgaagcagagtcttctcagaaccggggcgcgcgccagaatctccaagattctcctggatagagagggtcgaagccacaagacgaggcagaaagagcgcgcggccaccggagccccttagaaacactgccaggccacgaagcgcccgggctcctcagaggcgccgctcgcagcccgtcgtagctgccccacgcccgcctggccaaggccgcctccggtgcattatgggtggggagcccctgcagagcactgcggggaaccccctgcccagccagttgccggccgccgggtggcccaggcgatccgccctccggggtcccagggagccggccacgaattgactcgtccccctaggccccgcccctcgcggggttcccgccccgaagtttaagtcccgcccccgcatggccttgagtggctctgcggcccgctcccatctaccattggcaggatgcctgtcagtcattccgtcccgcctcctcggacccgccccggccggcggcgcgatcccgagaaccagccggcccgcgcactcactggtcgtcatgcgctgtctgtcatgaagctggccacaccttccatggggtgcgggtcctgggagtcctggctggacctcattggcttgtggcgccttcactcggagagacgcgcctcaacccggaagtgtgcgaggcgaaatctgcctagcaaccggggaagccgggctgtgaagcgggcaatttcagtgtgagactgagccgcgagactgagctgcggctccgagcgctgcgcggcggctcctcccgcccagggtcagcgccccggcgcgcgcacgcgcacccccgccgcccgagcgcgccccgcgccgcccgcgcagtcggtcggtcggtcgtctgtcctgtcgccgctgccgccgccgccacagcggccgccgcgggcgccacctgagggagtcgcctccgcgggacgccacaagacctgaccggactgcgccgcccgaggccgtcggccgccgtcagcgagggcgccgagcaacttcggtgagtaaggggcaggcgccgctggcgggtccccggtttccggtgccccaggctctctggggcttccgcttctcccgcactaccttggccgagtttactcccttctccacagcacttccccctcaggggagcccctgctctgggcccccccgcctctccaggggacccccgcctctctaggagaccccgtctctcttagggaccctcgcctctcttggggacacacccgcctctctaggggcctccctcctctccaggagacccttgcctctctaggggaccccgtctctcttggggaccccgtctctccaggcaggggatcccatctttctagcgacccccacctttctaggggactttcttcccatctaggggacccttgcctctctaggggactcccatctctccaggcaggggaccccgcttctctaggggaacgctgcctctctagaggatccgtgcctttctagaggatccccacctctctaggggaccccgtctctctaggggacctcgtctctagggaacccccgtctctccgaggggagccctgtctctctaggcgaccctgcttctctgaggggacaacccctcttatcaggggctcccccgcctctctgaggacccctgccggagggaacccccacctctctgaggaatcctgcctttgacaggaactaactcccttctttggggatccccaactctttgagaattcccgcttatctgaggggactcccttcttcactgagggtccctctacttttctcaggaacccatccttttgagggacccctgcctccctagagaccccttcctatctgaggacccccgcctctgaggggagtccctttctctgagggacccctgcctctttgaggggaatccccatctctctgagagaccctctgcctctctgagggtcccccgctttctttgaggggccctggcctctctaagaccctatcctcactcctctaaggagagacccctgattctatcagggtgtactttctctgagggatcccccaccttttgtggacccctggggaaccccttcttccccgggggacccctcttttcagaagacattgctgcttctcggaggaagccttgcctctctgtggggatctccccacccccacctctctcagctgtggtcctacttttctgacttgtccccctttctttttttttttgagacagagtctcattccgtctcccaggctggagtgcagtggtgcgatctgggctcactgtaacctctgcctcctgggttcaagcgactcttctgcctcagcttcctgagtagctgggactacaggcacccaccaccatgcctggctaatttttgtatttttgtagagagggggtttcatcatgttggccaggctggtctcgaacttctgagctcaggtgatccacccgcctcggcctcccacagtgttgggattacaggtgtgagccaccgtgcctggcccccgctttttgatgagtgccttcactttcctgagggggtcccccacttctttgaaatgcccatctgactggatcgttagttttctgaggtatacccctactttaccagtatccttcttttctatttcttctgggcccccaaatgctctatggatcctgcagttttctgaggggtccccagtttctccagaggttttccccttaacttgagatatcccactcctgtaggctcctcacatctctgaagtgtgtctccccttttccaagatatcccgtctcccgatgggagacactgtggatcttcttcacttccctgaggggtccctctgaattccgtggggttgcctcccacttgccctctttctagaggctttcctcttgattttctaagggagaaactctttatttatccttggagcactcacatcaagcttctcctccttttttttttttttggagatggagtttcgctcttgttgcctaggctggagtgcaatggtgtgatctctggctcaccgcaacctccgcctcctgggttcaagcaattctcctgcctcagcctcctgagcagctgggattacaggcatgtgccaccacacctggctaattttgtatttttagtagagatggggtttctccatgtgggtcagggtggtctcgaactcccaacctcaggtgatccgccggcctcggcctcccaaagtgctgggattacaggcgtgaaccaccgcgcccggccaagcttctcctctttctgtctgtggcacccactttcccccaactgtggaggaagagagcagaaatgtacccctccttcagtctttgttgccactctaggggtattctctggacttttatttcggtttccaggagcctggaggattttgtggctggaggggaaagtcaaaaagcatgatttcctcatgtccctctaagacctgctagatttgggggagcaggagctgctactagatgaccaccttagttactccattttccagccgtgaggccatcacagtgttgtcaggcctttgtgaagacaaaagggacaagggagaaacattgtatccccattatcacactgtcaagctgtgggagtgacccacttcctgtcccatccctcagtcctccccctgcatagtataacttaaccttccctccccgtgctgaaaaaaaatcaaaataaaaaggaaaagaaaactctccttcatctcttcctgttgcattttctctcccgagaccccctgattcaatccttgatcaaataggatccctagttcgtaggccagtttggtttgaaagacagagcaagaagcaggaaatggatcaccttagatccagaaacaggggaagggaggcaagggacaggatttgacgacatttctgtaagttttaggtgactttggcctggcccaaaaggaactttttacgtggcgtttacaaatctcatatgtactttttttaatggcccaccctggattccaagttcactccagtagctaattttatctgctttgccaaatgcagagctctgtggagcccaagtagatgaatgctggcattgagagatggtccaaaggacaggaatgaactcagtttgaaacctgagtaacttgtaaccacttcgtgtccacgcacaagtctcaagctaaaaatgtggggagagtttgactgaagtagagttctgaagtataggctgcgctagtgtttggtttagcatttcaacaagttcttccctctgactccattggaactgcagttcactttacagtttgactgagggcagtctctctcctgttcatttccatctgggtcttgcttaatttgagtcctttgtgaagactcctgccgaggctataatttgagttctaaatctgtcggtggaccatgtggacacaagtttcaactcgagctattttcttctggggagaagtgcttggagactttcctgggccctctgctgctgggctaagtcaagtccaggcaggaggctgctgcagacttggttgctcttctcctgcctcttcctggtcagctgtaggcactgccctcaggggaagggaaagttggaggggagtttgggactgagatgagggtagagaagtgcctgaggtgagggtagagaagtgcctgcacgtatttactattttattttatttttttgagacagggtctcactttgtcactcaggcgggagtgcagtggtgcgatctcggctcactgcaacctctgccctactggctcacgtgatcctcccacctcagcctctgaagtagctgggaccacaggcgcatgccaccacgcccggctatatttttgtatttttggtagagacgaggtctcaccatgttgcccaggctagtctcaaactcctgagctcaagtgatctgcccgcctcagcctcccaaggtgttgggattacaggcgtgagccactgtgaccgacctattattttaaataaaacctataggaccagcagatgggatgttaaaaagggaatggacaactttgaagtcagaaggagccagttcagattctggtgctgcccttcttagttatgtggccttggacaagtgatggcacaaaattggcatgttattaaatattcgagggaacacattgctgtgaatgtgtgtgtcaagttgcttactgatgatgggaggtgcttactagatggatgaatgaatgaatccgagatgatgaactggaggtggacagcacagctcctggcacacagttggtgtgcagtaaaggctgcttgttgtattcctggcctggactcacagaccaggaagcgcttgatattctgccaaggctaaaaatgcccaaagagaaagaaacttggtatgtctcttggaaaacccactcccctactgcgtctcttagcaagagttttctgtgttctgataccagatgtgagatgggtttactgtatggcagggcatttgtgtttctcttggccttggtgtctccccctgtaaaatggggtaatttgtgaattaagggcaagtagggagatgtattactctaattagaccacaggcaagatagaagattataatggacttgaagaattgtgggaagaagaaaatagatgaactatgtacgcctaagggatcacatgcgtattatgagactgcttgagtgagtgagtccagcagttacctggtgagtgatctgttcttacactttagaaccttgaaagaagagccattctttcattgtaatagatcagatttggggacaaaagactgggaaagtgatgtacaaagccatttgacgccacacaataatagtactttgagagggccagtgtgtggcttagtgcccacgaggagatcagaatgcacctcaagctcccaaggcccagagggctgtggagatgctaactcagcttagaggctggggcaggggtcggggggcagtggaatagaggggagtggacaggacattttacaaaatttttttcttgagaggatttttttcttaacaattagtaaaagccatagaatcatggctggtgaattaggcccagccttcttcacttactagtatgggaatagatggcattctgcccctgacggctaaaacccaggaggaaataatgggtgaaaatctgaactaggcccctggtgggctgctcctatgtttgaagaaagggttgtgggtttttttgtttgttttcttcctggaaatataccctctctcttcctccttccctcctttctttctctctttcatgcacacatatatagacacacactgactttggtattgaagcaaagaaatatgcaccaatcttaaatttctttcaattcttttaaggacagttattccattacatgggaaaggagcaaaatttattatatttaaaatataagaactaaggtaaacaactttaaagggatcactctcccctttaaaattatgctatgtctcttgtgtaccacagacttcactttggtggatggtggggccaccaccaagtctctatctaacaggaagttttttaaacttgtttttttttacttgaaggatccttacagcaataaaaaaccttggatagttagaaatgatattgatctaggtacatttattagatgtaatgtaatgtggttatctgttggtgggcaggtctaaaaggcatgtgggtccaaacactgcccagcttctaactctggacgataaaaactgttgatttatggaactgaaatagctagggaagtcagggtttccttcctgttggagacagcactgggggcattaaatccctgtgggatcttgatgataagaaataagctgacctcttttggaattgggaaataactactgtgtcaagtggttccatccaaatgaatggatggtgttatttttgatttctagttttaagtttgacttcatcctctcagaaacttgactgcctttgtttatactggtgtgtcttttgaataagagtttttcctttttttttttttttttttttttgagacagagtcttgtgctctgtcacccaggctggagtgcagtggtgcaatcacagttcactgcagcctcgacttccgggctcaagtgatcctcccacctcagcctcttgagtagctgggactacaggcatgcgccaccatgcccggctaattttgtatttttgtagagacagggtctcgctatgtttcccaggctggtcttgaactcctgagttcaagtgattctctcactttggcctcccaaagtgttgggattataggtgtgtgcctggcccaagtttattgtgtgtgtgtttttttttttttttccagacagagtctcgctctgtcacctaggctggagtgcagtggtgcgatcttggctcactgcaacctccacctcctgggttcaagcaattctctgtcttagccacccgagtagctgggattacaggcacccaccaccatgcctggctaatttttgtatttttagtagagacggggtttcaccatcttggccaagctggtctcgaatccctgacctcgtgatccacctgcctcagcctcccaaagtgctgggattagaggcgtgagccactgcgtccggtcaagtttttttttttttttttgaaacagagcagagtcttgctctgtcacccagcctggagtgtagtggcacaatcttggctcactgcaacctctgcctcctgggttcaagccattcttctgcctcagcctccccagtagctaggattacaagtgtgcaccactgcgctcagctgatttttgtatttttagtagagacagggtttcaccatgttggccaggctggtcttgaactcctgaccttatgaactgcctgcctcggactgccaaagtgttgggattacaggcgtgagccaccgtgcctggccagtttattcttttaaattggcttataaggggccaggtgcggtggcttacgcctgtaaccctagcactttgggaggctgaggcaggggatcacttgagatcaggagtttgagaccagcctggccaaaatggcaaaaccctgtctactaaaaatccaaaaattagctgggcgtggtggcacatgcctgtaatcccagctactcgggaggctgaggcacaagaatggcttgaacctgagtgagaggcagagtttgcagtgagctgaggtcgggccactgcactccagcctgagtgacagagtgagattccgtgtaaaaaaaaaaaaattataagggacaagtgaacacttaagagctttacttgtgtggccataagatatggtgtatgtgtgttttctagtgcaatttacattacattaaaaattagaaagtgttaaatcttctggcccatgtaacttcctatgcgaacaaataattcaggaacaaacactttcatgcctaagataaaacattttcatgcttggtgatgggggtctggcagtgagcaggactgacacagctggccttccagaagcttacatcttagttgcagacaaataaacaagcaaatgaatgaaagaacattgtgaggtttcttgagaatatccctaagtgctgcagctaccctcattgggagcttcaggtggggtttcttggaggtgtagaagtgaaacctcactacctctttaatttcctcactgggctcctgtttcctgtctctaaaaggagacagaaattatggcattttcctacttgattgttggcgatagttgattcatgaccactgtggctgtaatcttggagaaacgagagaaactagaatggtcacggcagggagcattttcaggtttgcctttgtttctttttttttttttggagacagtcttgctctgtcgcccaggctggagtgcagtggcgtgatcttggctcactgcaacctccacctcctgggttcaagtgattctcctacctcagcctcccgagtagctgggattacaggcacctgccaccacggctggctaattttttgtgttttagtagagatgggggtttcaccatgttgcccagggtggtctcgaactcctgagctcaagcaatcctcccgcctaggcctcccaaagtgctgggattacaggtgtgagccaccatgcctggccaagtttgcctttcttgaagtcagtggagacgtgtttttggaatcctgtggcatttcttcatggcaatgcatattacactaagtgataaaccgctctaaaagcccttcccttgttgaaatcttaaaaacattcagacaagctggggctgcctgggtgttggtggtggtttaggaataatgagatttccaatagatgactgctttgttatgtattggtagactcttggtgcatggatttccctctgcccgggctttcctcttttttttttttttttttgagatggagtctcgctgtgttgcccaggttggagtgcagtagtgtgatcttggcccactgcaacctctgcctcccaggttcaagcgattctcctgtctcagcctcctgagtagctgggattacaggcggcatgctgccatgcctggctaattttttgtattttagtagagacggggtttcactgtgttgcccaggctggtcttgaactgagctcagaaaattcacccacctcggtctcccaaagtgctgggattacaggcgtgagccaccactcccggcccaggctttcctcttacactgggactgggaaggtgctgtttagacttttttatgttgggcaaggctggaagtcttagatttgacaggtgcttttcttaagtaagtgtatctgtgagaggtggggctggagagcaaggcgggatattcattttgggcacagcctcgagggcaagagggagggtgttagaaggagagtttctggttgtctttttttttcccttccacccaagttctgactctggaggtggagaggcaggcccaggccggaagtgggcgtggacaagtaatgcaactgtgcatgtgaccaggctcccacctctgggctctgctgcccttgggaagtggatgcttgctccctcctgacttcctgttctccctccttacaggctgagttcttgggctccaagttgagcacagaaaatacgttcaaggccgggcgcggtggctcacgcctgtaatcccagcactttgggaggctgaggcaggcggatcatttgagcccaggagtttgagacctgcctggccaacatggcgaaaccccgtccctactaaaaatgtaaaaactagctaggtgtggtggtgcacgcctgtaatcccaggtactctggaggctgaggcaggagaatcacttgaacccaggaggcggggtttgcaatgagctgagatcatgccactgcactccagcctgggcaacagagcgagattccgtctcaaaaaaaaaaaatagaaaacatgttcaagttaccccttttccttggtaagccgctttgtcagagctggaagccaccagtggacctgtacttgccagttttggggtctcaactaatacacccacaaactcagaggcctatctggcagggcggccaaaaagatggtttcttgttatattatcacagtgttcccctcgggagcttgtctgcaccaagagctgcctggaggtgtgtatggaacttaaagaatccgacagtagataggtccttcaggaagagtgtgttcttgaagaatcgtttgcagttacttacagctttttgctttataaaagtacggtgggagtccctgtgccatagaaactttagagccaaaaaactttgggcttgatcctgattctaccacttgctggcatgtgaccttagaaaaatagcctaacttcaagtggcctactctttctgagcctcagtttcctcaaaattaaactcaaatcctcgtttgtgggctggtttgtttgtaagcatacagcaagcggccagactgttgtagatgcctagtaaaggtagttgttaaagaatcatatttaggagccgggcacggtggctcacacctgtaaacccagcactttgggaggctgaggcgggtggatcgcctgaggtcaggagtttgagaccagcctggccaacatagtgaaaccctgtctgtactgaaaatacgaattagctgggtggtgggcgcctctaatcccagttactagggaggttgaggtaggagaatcgcttgaacctggaaggcggaggttgcagtgagctgagatcatgccactgcactccagcctgggcaacaaaagtgaaactccgtctgaaaaaaaaatcatatttaggctgaccgtttctcttgaggttggcacctgaggttggacaacaatctgtggatgttaatactgcccaagaacaaaccagttgacactgggccaataggctgagcatgtctgaaggccagtgatctggaagttcctagtttggttgatttttcccagttgagatcccttagttcattgtagctttaacccctacagcctcaccttactgtactctccatatggacttgaagtgcctcaggaaacatgatggggtaattgggaaaaaggctcaaaccttgagctcaggtgatctgcctgccttggcctcttaaagtgctgggatttcaggcatgagccactgtgcgcgacctgtttgttaggtttctttttcttttctttctttctttcttttttttgagacagtctcgctatgttgcccaggctggagtgcaatggtgcagtctcagctcattgcaacctccacctcctgggttcaagccattcttctgcgtcagcctcccgagtagctgggattacaggcgcctgccaccatgcagggctaatttttgtattttcggtagagatgaggtttcaccatgttggccaggctggtctcaaactcctgacctcgtaatctgcccaactcagcatcccaaagtgtgggattacaggcgtgagccactgctcccagccgttaggtttcttaagtggctaggtgttctgagaagaggcatagcatgggcacaggcagagacctggagttgaaaacagccaagtgagttcccttgacctgaggaggttatgctcttctaaaagtcagagtttgagctgatcacattggcaagaaaagtccaaaattgcttccaaaggtagaaagttaaaatgtgctatagtaggatccaagattaaactcaaaatagtatttaaattgagcttttattttttttgagacggagtttcgctcttgttgcccaggctggagtgcaatggcgtgatctcagcttaccgcaacctccgcctcctgggttcaagcgattctcctgcctcagcaggagaatgagtaatgtgtaatgaggctaattatatatttttagtagagatggggtttctccatgatggtcaggctggtctcgaactcccgacctcaggcgatctgcctgccttagcctaccaaagtgttgggattacaggcatgagcctccgtaccgggccttaaattgagctttcaataaacattttcaatcaggaagcaatgatggccagtgaaatcagccatctagactctgtaatggtatactgtatatgtagactttaacctccaaaggagcttcaagagaacagacttcagggctgcttctgacctttttcctttgagaattgttatcatttaagctggtctaaaattcttaatacatcagaacagttttttgttttttttgagacagagtcgcactccgttgcccaggctggagtacactggcattactgcagctttgaactcttaggcccaagccatccccttgcctcagcacccagataactaggactacaggcgcatgctatcatgccaggctaattttatttagttagttagttagttaattagttgagacagagttttgctcttgttgcccatgctggagtgcagtggcgtgatctcggctcaccacaaccttcgccttctgggttcaagcaattttcctgcctcagcttcctgagtagctgggattacaggcatgcgccaccaggctcggctaattttgtatttttagtagagatggggtttctccatgttggtcaggctggtctcgaactcctgacctcaggtgatctggctgctgcagcctcccaaagtgcagggattacaggcgtgacccactgctaaccgccttatttatttatttatttgagatggagtctcgctcttgttgcccaggctggagtgcagtggtgtgatctcgggtcaccgcaacctccgcctcccgggttcaagcaattctcctgcctcagcctcccgagtagctgagattacaggcatgcactaccacgcccagctaatttttgcatttttagtagagacggggtttcatgttggccaggctggtttccaactcctgacctcaggcgatccgcttgcctcggcctcccaaagtgctgggattacaggcgtgagccaccatgcccggccagctaattttattttttaacttttgtctcactgtgttgcccaggctggtctcaaacttctgggctcaaggacttctcccaccttggcctcccaaagtgctgggattacaggcatgagacactgtgcccggcctagaacaatttaaacttactttcggctgggtgtggtggctcacgcctgtaatcccaacattttgggaggctgaggtgggtggatcacctgaggtcaggagttcaccaacatggtgaaaccccgtctctactaaaatacaaaaattaggccaggcgtggtggctcacgcctgtaatcccagcactttgggaggccaaggcgggtggataaccaggtcaggagtttaagaccagcctggccaacatggtgaaaccctgtctctactaaaactacaaaaattagctgggcacagtggcgggcgcctgtaatcccagctacttgggaggctgaggcaggagaatcgcttgaacccgggcagcaggggttgcggtgagctgagatcacgccactgccctccagcctgggcgacagagtgagactccgtctcaaaaaaaaagcaaaaaattgccaggcatggtggcccacgcctgtaatctcagctacttgggaggctcaagcatgagaattgcttgaacctgagaggtggaggttgcagtgagccgagatcatgccaccacactccagcctggatgacagagccaggctccatctcaaacaaacaaacaaaaacctacttttttttttttttgagacagggtctcattctgttgcccacgctggagcgcagtggcagtagtgacacagctcactacagccttgacctcccaggctcaagcctgctaatttttgtattcttttttgtagggacggggttttgccatgttgcccaggctggtctggaactcctgggctcaagtgatctgcccgcctgggtctcccaaagtgctgagcttacaggtgtgagccacctcgcccagccaatttttaaactttcactgcattttcaaactttagcctttatatttaacctctcaaattgtctctattgaaggttacctttttgacctaaatttgaaataaatatcttagtcttcccaaaacaggagttagttagatatagacctgattacgtgggcatgtgagagggcatggttgttattatcaagctgtgaaagagagaacaaactagaagggcactccacctgtgttttttaaataaattacgggcatttcactataaatggggggtttggggagtatacatcctgttaggaaaacatttgggaggaatgttttcctaagttggcagatctgccatttaacaaatggggagtagggtgtgaaatagatgccaagttttaaaaatacgtttttctgcatgtccaactaaggatatttattagaccgatcatgtgactaacactccttccctgcttggggggtttgaataggctgatttccagactcgaggctgtcatatagcctttttgtttttcctggtagttttctgattttttttttttaatctttaattcatagaaaacagtttacttccatccaaattaggtgggaatttttttaaaccatatgtagacacaaaagagatattccttgccaactagtgacacatggcagatgaagacagagtgggagatacacttccggttcacaacagcacttctgagcagtttgtgcttaaccctttaggggagcatttgtgctcagaaccctggaatagcaggacagtgccagggccacacagagactcagtctggaaagagcctgcctaactgcagatggagcctgaaccctgcgctgcagaaacactgagtgtaacgaattgtggttagagacgacattcaaaacaaacacacgttgacaaagtggaccatccctagagagctgtttttcagggagcttttcagcataaacgatggtgatggggacaacgggggctactgacccatgtcccacaaactcttgatctagtgtgagaatgttgtgaatgcaaagatgattcttgtagcagtggtgatacattggaagtactgtatttttcataaagcatcactgtaagagtccctgtagctattttctggtccctccctgaagaaagaatcaggagtatcaaagtattaaggaaatcaaaatcacttaataattaatcttttcttttcttttcttttcctttcccagccaattgcattgtaatctcaccatgtaaacatggatttggggtgaaataagaaactttaaaatgatcctcccttagagattgttgttatattgtccctaaacttaatgaaaacaattttaaactttagagtactaagaatgcaaagtacagaaagtagggcccgatgtggtggctcctgcctgtaatcccagcactttgggaggcagaggattgcttgaggctaggagtttgagaccaacctggctaacatggcgaaaccctgtctctactaaaaatacaaaaattagctggtgtggtagcacgcacctgtcgtgtcagctagtccagaggctgcggcacaagaatcgcttgacgccagaaggtggaggttggagtgagccaagatgatgccactgcactccagcctagggcaacgagcgagactctgtctcaaaaaaaaaaaaaaaaaaaaaagtagtcagtgttcgtttttcataaaggtgattaaaagaaaaaaaacttggctttttttttttttttttttgagaaggagtctccttctgtcgcacaggctggagtgcagtggcatgttcttggctcactgcaagctccgcctcccgggttcacgccaatctcctgcctcagcctcccgagtagctgggactacaggcgcgtgccaccatgcacagctaattttttgtatttttagtagagacagggtttcaccgtgttagccaggatggtctcgatctcctgatctcgtgatccaccctccttggcctcccaaagtgctgggattacaggtgcgagccactgcgcccggctgattcttcagtctttcttatgaatacattttctgcattgaaatcattttgtgtctttcagtggcaccagcctgtcagcttcgggagtatgtgcctgtaggcttcttgggctccaaaatccttgggaggagtggtctctcagttgtcgatcagtgtttatcacataagtcatcttgtatgttgtccaccaagaacttcaaataaattttctgattgaaaaagtaccaaaaaaaaggaaaagaaaaaggacagtaccttgaacattcagtaggtgatgctactctttttcagtagtttcatactagtttggagcctttggccaatttctgccataaaagcagacataaacatggaatttggccccaatttcttctcagtccctcagttgtatagggacaggctcaggtggtgtttagaagtttaagagtacactcgaaagaccattagtctatttttgctgtagttaaggtagaaggaggcctagctattattagtggggtttggtctatgaaagacaataaagtttaaaatgaatttggaagttttttgttattgttgttgttttgagacagggttgcactctgtcacctaggctagagtgcagtggcacaatcatggttcactgcagcctcaaactcctgggcttgagtgatccttctgccccagcctcctgagtagctggggctacaggcatgtgccaccaggctgggctaattttttcttttttatagagatggggtcttaccatgtcgacccggctggtttcaaattcttggcctcaagcaatcctctcaccttggcctcccaaagtgctgggattacaggtatgagccactgtgcccggcctggaagaaaattttaactaaataacaggtgttttgaaagtacagtattgggccgggcacagtggctcacgcctgtaatcccagcactttgggaggccgaggcaggtggatcatgaggtcaagagattgagaccatcctggccaacatggtgaaaccttatctctactaaaaatacaaaacaattagctgggcatggtggcgcatgcctgtagtcccagctactcaagaggctgagacaggagaatctcttgagcctgggaggtggaggttgcagtgatccgagatcgcgccactacactccagcctggtgacagagcaagactctgtctcattaaaaaaaaaaagaaaaaaagaaagtacagtattaattaacaacggctatcactaagggttttttttttttgtttttgtttttttgatttttttttttttttgagatggattctggctctgtcggccaggctgtagcgtaatagcgcgatcttggctcactgcaacctccgcctcttgggttcagcgattctcctgcctcagtcttctaagtagctgggattacaggcgtgcaccaccatgtctggctaatttttgtatttttagtagagatgaggtttcactgtgttgaccacgatggtctggaactcctgacctcaggtgatccacatgcctcggcctcccaaagttctgggattacagacgtgagccactgtgccctgccagcactaagtattgactgtctttgttttcagatcagagagaaaacttttagaaaacatggttctagccctagttgtttcttaattagagtttcttcagctttagtatggcatctgaaggtgattgcatcatatttcataatcacccagctgaactatttgctgtttagtccagcactgggcactgaggctaaaagatctttaatccaaacagcctcagcattcacccaacctgagcctatgggaccccaagcagatctggattcactgtcacttaccatctacccatctgaccctgtcttcctatgacagacagaaataaaccctgtagctatttcaccccacctacataccctgcacccctcctactccccgtccgactttcctggctgagaagttggcactgccctctggagcaggccctgtcaccagtgcacccctcactccacaggggtgtgtcattaatgtgttgcagttgatgcctccctcttaaaaaaaaaaaggggtggttgtcaccctggtgactcacacagggcttgctggctcaaactctggaatctgtatatctgtctcaagtgtcaggtctcccacctgaccacactttgctctgtttgtagttaattaaattgacattaatcaagacccaggtgaggagcagtgaggtaatagtttgcttgtattgctttaatatacatcatctgattaatgatcgtagcatgaagcagttcttaaaatatacagccaccatgttagggtgaaaaacctggatggttgccctaaaccaaccttgcgcttgggatcagggagctctttgaattcctataccgagtcacctgtttgagaataagactgttttgtttgtttggtttctgaatttgaacatttgaatttctttgtagcaaagcaaagcaaattggtgacataactgggtcagggaaagtgattgggagtcaacagtttgtattttgtatcatttttaggttgaattctcttttggcctaggggaggttgtgccagatgttgcattaagtagtgggaagattttggggggcagggcggtgtgtttggggaggtgtgaggtggcggggtggaataaactacaaaaagttgacaattgtatgtagaactcaacacagaattaggagcttttttgaactctgtttaaggggacatacagcagaaaaacaattttttttttttttagaaaaacaattttgtaaaatttgttctacatgaagtgtttttcaggtttgcggttgagacccaattattcttgggcgttacattgattttcttttcaaatgaagtagaatagaaataacagtacaggctgggtgcagtggcttatgcctgtaatcccagcattttgggaggccgatgcgaacagatcacgacatcaggagatggagaccatcctggccaagatggtgaaaccccgtctctactaaaatacaaaaaaaaaattgccgggtgtgatggaacgcgcctgtaatcccagctactggggaggctgaggcaggggaatccgtgaacctgggaagtggaggttgcagtgagccgagatagcgccactgcaccactccagcctggcgacagagcaagactctgtctccaaaaaaaagaaaaaagaaaacagtacgttgcatgtggtaaatttatgtttggtgaaacttttgtttcagttgtacatatagatttattagggtatgcgataaagcatgtcaccaccactcttcaggagtctaggtgtctcatcaggaatcgtttgttttaaaacaacatgaaaagaggcggttttggggattcctcagaacctgattttggtattgagagccttcttgtggtagattttccatgaacttgatattttccctattgaaattgtatttcgctttatgtagtttaacatctccaaagtccattctctttcaggctttcattctgtctcctgtgtttcctccttgttactggagagggaggggtgcagatttgctttcttgaggggttttcaccttctccctgaggcacgagggcagattgggaggtaactggagagggagagcagtcgtccccaagtgtcttgaggtgggtgggtctggagctttctttgtagaattctgttcactgcactggagaagtgatcgttcagccgatccacaccccgccctccccacagacaccggggccgaagttcccagagaagagcttccgcgtgacgaccccgcgggggtgacattctaacccgcgtttcagaggcaaccctgagttgcttgaggtcgcccagctcagctggcgcgaggtcagcagtgagcgcgtcgtgagtcagccttgggtgcggcccgcccggctttgccgccggtgagttggccacgacccttcggcctgcggagggcgctgggactcggcggggagggagccagccggagcccgcgtgggaaaccagcgcgcccaacgaggtgtcgcgtgggagcgcgccggagaggggcggtgcttccggggcggtaccgtccggccccgccccctcaactcaggggcccgccttctacgcctggaaccccgcccacgagctcctcccttctcgtcaggccccgcccctcggtcgccacgccccgcccagccgggcgcgggcgggcggcgtcgcctttaagagctccccggtgttttgggggccgcgggccgggcgcgctgacctggtgcgcatgtcccgggcggtgacgccggcgccgggctccatgtgtgcggccgaggggcgcattatctggccggcggcgcgggcgggcgggcggaccggcgcagcgagcgccgcgggcccgggcggccccacaggcggaacgagcgcgcgcggcccggcgtccccggcccctccgccgcccggccccgcgggcgaccccggaccagcagcccccgtaacctgcgcgctgccctagggcccggccgacccgcggcccggtaagttctggaccaaacttggcggggggcgggggctggggacgcacggctgagactggagcggcgcgggccgcgcagggtcggggcctcggggggctctgaaggacccctgcatgagcgtggaaaagtgagagcgagcgagttctactccttgtattctgggagcgtcttcttgcgctgccctggaaagttccttgccccgaggcggcccgggcacgtgggggccgggcgggggtcccggaaagtcgcggcgtcgccccgcttccgtcctgcgcttcctgcggggtcgggggaagggctgggccgcgaggcgcctcttccgagtggtcgggacgggtggaggcggcgggaagacggcacgtgggcgcgcggggcgggggtcccgctcaggggcgggggtccggggcgggttgggcagcaacgctgaaccccgcggcggcggcggcggcggcggcggcggatcccgtgtcagaataagagtccccgcgcgcccacgcctggagggccggccctcccccagctcgcgcccttcctgcctaacccccgggagccgcgggaccctttcccctctctgatctccggcctttctcaaggcccgacactttaaatttgcctccccatctaggcggtggctccattgatttcttttttcccacctagagtgggtcggcatcagtgactagacagcagcagctggccttttaaagggattattgccaagaatcggaattgatcacttcaacaaggaaaggcttatgggcagggcccaggctgagagcctgacggacacttggattgtgcgcacactgggacccagaaatgaatggtgacccctcccttaggaagtgaatgacaacccttaggtgcgtgtttctgccctgagaattttgcacagggcaaaattttgtaggtctgacttaacgtctttaggtgtatagttcatccttatcttaagagctgtggattctttagatcaaagtccgagtgagtcacttgagcctttaattttctttcttcctaccagtttacttctttcagttttcttggagtacatagtgctggttacatctctggttctgtgtgcccattcacacagtgacacctcctggctgtggcagcacagaaactgagagccctctgtgcgggtgtctcagtcttggactgtagtcctgttgactgacttaactcttctggtagtcgttacaagttttcttttaaactagattacatgaaataatgtttgttggcaccagtttgttaacatatgctaagcagtagtttgtcagacctgaccacaagctgtggagggctgatagctcatactagccctcgggtttgagtgcctactgtgtgctaagctcccctgcacagacatattcagtgcctataacaatcccgtggggagtagggaagtattatctgcgctttacaggtcaggaaattggggctgctggaggccaggcggcttgctcaaggcctcttagtagtgaggcagagccaggcagcccgtacttggtgctctagagcccacaaatgctgcagtttgcgaaccctagtgagcatttccctggcgcttctaaaatacaaggccattttcttgtccaggatccagggcacctctgtttgcggatgtaggggataatctggtgacatggggacaccatgctagccctgctttgttctagtggagcagcgttaccagctggattttaaggaactgaactacagagttagttgctactttgcattcgcttcttcagctttggactcagaaaagttggcccttttctagaggaaacagtttataggatgtgggaaatttgcaagggattttctgtatcctctgtcttcacttattccctcccctccttcatctttcagttcttatttgtctcataaaattccgaagctggtttttatgaagattgcttctcatcttggaagggctatagagaatggaaagatttggatgcagtgtgttttgtttgtttgtttgtttttttgagacggagtctcgctctgtcatccagtctggagtggcacgatcttggttcactgcaacttccgcctctcaggttcaagcaattctcctgcctcagcctcccgagtagttgggactaccatgcccggctaagttttgtatttttagtagagacggggtttcaccatgctggccaggctggtctcgaactcctgacctcgtgatctgcccacctcagcctcccaaagtgctgggattacaggcgtgagccaccacgcctggcggatgcattgttatttccactcagatgacatcattttttaaaatgtcaagtcatctctattaatgcagtatcatttggcaaatcctataatcttatattttgatagtgagggaaaaatataatgctactttcggtaggaaaaaatcctggaaggatttgtaccagaatgtcaataaaggtctctacattaggattagcaatagtttttcttttttagaaaactttttagtgtctctgtattttgcgtgtgtgtgtatgtttttaatgaggaaacatgttttaaatactctaattttcaactcttcagtagctcctctgacttgttttgcatcatttattttctgaatttctggcattgcaggtagtgatttctagattgatatattcaacaaatatcagagtgcatactgtgccttcgacactgcgaggaatccctcctcagtagagtttatagtgagattagtgggccaggagtcgtaattaatcttataaacatggggaaacttacagggatcaaggagagaaggacactgtgacctggtgagcccgaaaggacctttctcctactggggtcagagaacaagaagggggaccctcttgaaggggattaaggcaagggctggtgcagtgaggctcacagccgggacctctttgggtcttagcagatgactaaaggatgcctctgaagaatgtggctggtaaagttgtaaagccattcttgaaatgttggctttttttttttttttttttggtgtttgttctcttggaagaaaattaagaatgaccagcagagttttggatatatgaattcccaacagagacaaaaatgtaatggcccttaccactgaatttgtttaaggaccatcattagcatgtactgacacctcaaagcctgggcagctcagatgcttttctggagaactacctgcttggactcggggtgtttctgtgccatcaaatggaacaggcagggctattttctctagacctttcccccccataattgagttaatttatgctggttgtagaaaactaggaagattatgaaataggtgagtgggtgaagtcttctcgagcagctgtcctggggtaatagagcatccctgggatttcctcctaacccttgtctggttgggaagtgtggcagaaccagaagaacaagttggcaatgtcatagtttgaggcatacagaactatgctgcctgctaagtgtggtcgtttgttagaatggatgcttttgagttatctgagctgcttcgggaggtagctttccacagtctggcctcagactgtgggtcttccaggttaacaggacttaagtgctaactgtgcaaaggtatgtctttgaatggaattaggaaggcagtgtattaaaaataagaaggttgagataaaaaaagacggatcttgaagtggttggtggttgcagcgaggtggaaatagtgagacccgtactgtcagaaacaaaggtaccactggggacagatcccgctcgagcatgggttccccagcatccccgcaaacaggatctgggacttttttgtcaagagagtgtcagaccgttggcttcttgcccctcccccaccttgtgctttccagactatatttgtgacctctttttgtctgatggaaatgtaggttagtcttttagaagacaaaggaatttaccctaatagaatacctttaggtagcctcaggaagtgattgggaatccacgaaaccctctaggtgtgggagagaggggccctcagtgagaatgtcacacgtttgcaccagtttgcacagttgccagggccccttgcagctcctctgtacgctgtaccccctttgtctctcctcagcctccagaggcaccttcacaggtgagtttgtcagggaacttgcctttctgtctgattcctgattttagggttccttatatggaagggctgaagacctgcaatttccgaggatgctggaggctagcttctgagataggatttgctggcaggagatgagcagtactctaaaggagggctcccagcaagtcaaagtgggagttcttggggcagggggtgggggatgggggtggtgggtggagtggtcaaggcttcagggctttcctgctgcttggcctcaaagatagtagctatgcctgtggggaggggtgtggccatgtggtacaggattggggagaaattccacttgtttgaaggatttgttgaagaatccctcagctattcctcctgcagttccgtctcaggacctggcgctgcgtggcctgccttgccggttagatattctggtttgaaccttgaaacgtagcctaaataaggtggtgccttcgagcacacactttaaaaatactgctgcattatggtggcacagcagctcctcctgtgccaaggaggccactttgagtctagggggcacctgctttttgccaagtgtggccgtgtgcctattgctgagcagcctgtctctagtggcatccaggacagccctggctttgcctcaagacagcctggtgtgagctctgcccagccacttcctagcgaaagaccttgttgaacatcacccctgtttcccatttctgtcaagggggtacttactatctcccgtggaaggctgtgttgggagtgagataacaagtgcaaatgatcgaccccagtgcctgtgtgttccacatgttgcagttcagtgagtactgttatgactgtaacagatgagccagagttcacaagcattaacaactgccccacctcttctgtgggggatgacaccaccctcatggcaaactgtcactgtctgcatgccccctttggagccacactggggcgcatgcctcagctttgtgccccagcctattcccctctctccatgttcctgtgaagaaggcaaagttccccacaggaggtgatacttgccatagtcaccttgctcattattcggcggctgggacccaacccagcctttctgatttcagacgttgtctattttttccactgccttggggccttcttgacgatactgaatgcctgggttggttgtgccccaagccaggaggcagcctctttcctggcccagggcttgtggaagccagcatccggacttccatctgtgagatgggaagctgtttgccgggcagatctgtcatgggagccttccttagagaactgagaggggtccctgtcactgagtggactctgggtggaggctggaagtaggtggtttgatggtacttgcagtggtgtctgggagcgccagggtgaatctcatcctcctggacttgcctttcagactgacagctctccagccagcttggagttggacagatctggctttgtcactgacgatatgcagtttaccactcttcagcgttgggtgggtcacctgatcacctggcctcagctttctcttatgttggcggagacagcatctttgacctaacaggatgctgtgaggacaagtggaaagtgtctacaggcagtcaggggtattccagcctttgcctctccatttacctcagagccaaaaagctttctccccccagatgtcaactacacagtgattcttgaacacctcatatctcagttatcacatataatgtaacactcagattgaggagcttggttttctttataacagaatcctactgcaagctaacaatttggaggcctaagagtcaggtcaaggccgggcgcggcagctcacgtctgtaatcctagcactttgggagcctaaggcaggctgattgtttgagcccagtagttcgagacccgcctgggcaatgtagcaatcccccatctctctctctctctctctcttttttttttggtgggctgtctcaggccgcttttttttctctctctttttttttaatttttaattttttttttaatttttttgttgagacggagtcttgctctgtcagccaggctggagtgcagtgacgcgatctcagctcactgcaagctccgcctccggggttcatgccattctcctgcctcagcctcccaagtagctgggactacaggtgcccgccaccacacccggctaattttttgtatatttagtagagacggggtttcaccatgttggccaggatggtcttgatttcttgaccttgtgatccacctgcctcggcctcccaaagtgctggcattacaggcgtgagccaccgtgcccggccgattccccatctcttaaaaaaaaaaaaattagccaggtgtggtggcatgcatctgtaggccctgctacttgcgaggctgagatgggaggatcggttgagcctgggaggttgaagctgcagtgagaggagatcatgccattgcactccagcctgggcgacagagtgagactctgtctgcgggggggataaaaaaggtctgatcagattatctggaagggatgtgaaaaaccctgtggccctaactctacaaataataccaacttaacattttctccagtcacagccattctgtgcaattaacctttgagtcagtggctgtgaatctatactcaacacattcttaccttagagacggctgcttgccctgacctcggaggtgggcaggttttaggccagtaaagtaggcctccaatttacgatggattgacttaaaatttttcaactttatgttgggtttatcagaggtaaccccattgtaagtcgaggagctccctttgatttgtaacagtttctcctgaacacagatccctttcgtaccatggtaaagttgagaaattttaagtcgaataattgtaaaatgggaccagtggctgtgttaaatgcatttgatattttctactcccagtggggctgcattctaataaacccatcataagttgaggagcatctgtcttcttgttgctggggtttcaagttggtggaatttggtggtagtgacagcagatttttagttctcttgtgtgtttagcacaggctcactctgccagcaagttttgaaaactgctgctaccaccttcgttcacatccgcagaggaacatttttccttgttgctcaagtgtggctggagaaagtaggagagtggtgaactgaattcttggtttgaaggcatcgattgaattggttccgtcactctcgagacctgtgctgttctcaggacttgcgtatcattgacggaacacctgaacttcattttctgtcttctcatgtagtgtccctgggtttgccgagggttcatgcccaccccgttcagtggtggttctttcagaggattctgtagtcagctcctttcctagggttctcttatagccactctaacccagggagagtttgctggtgtgtttggtgtttttgtttttgtttttttgagatggagtctcactctgtcgctcaggctggagtgcagtggcgcaatctcggctcactgcttgaacctccgcctcctgggttcaagcgattctcctgcctcagcctcccgagtagttaggattacagacacccataactttgcctggctaatttttgtatttttagtagagatggggtttcgtcatgttggtcaggctggtctcgaactcctgacctcagatgatccacccaccttggcctcccaaagtactgggattacaggtgtaaaccaccgtgcctggctgtgtttgatgtttttattaatacgttcgtttgatgaactgacctcggtagtttgtatgtgggccatctgtctcctgcctcccttccccaaacttttggtcaagtttttagtgttgagtctttttgttgttgtctcttttctgactgtacaagcaacatttcctgatgccgaagtctggggagggggtgggagcctcagatgttggtggtaggagttgcctggtctgcttttgaagttttcttgggcaagtatattaacatatactgagtataggttcaaatgtaattgcagtcttattgttagtttgtatctgtcaggttataggattagaaatataactatttttgggagttgggtagcagacaaactgaggattctacctgggactttcttctgtgtactgtgctctgctgaacccaacactgggcacaaacaggaaactgaggctcaagcggaggaggagtggcctgcccaaggttgacttgcagaaggaatgaggatatatccctgttttctcctggaattagactttcagatctctgttgttcttactgatgtctttgtggcttggtgaattttgttttagcttccttcttactttatttatgtaggtccattggtcagtttccttcctcagggccttgtctttttttttttttttttttttttttgaaacagagtcttgctccattgtccagtctggagggcagtggtgcaatctcggctcactgcaacctctgcatcacggttcaagcgattcttgtgcctcatcctcccaagtagctgggattacaggcgcacgccaccacgcccagctctttttttttttttgtagagatggggttttaccatgttggccaagctggtcttgaactcctggcctcaagtgatttgcccaccttggcctcccaaagtgctaggattacaggtgtgagccaccacaccctgccccctttttttttttttttttttttttgagtcctgaggtcattttgggtgtctgtagggtgaggatggggcaggacatggggagggagaacttagggctgcctctggtttctcagggcagccttaaaaaaaaactatagtggccaagtgtagtggctcaggtaaccttagctctttgggaggctgaggtgggaggattgcttgaggctaggagtttgagattggcctggacaacatagtgagacctgcccccgcccccctccccccaaaaaaaccccaaaaaactgtagtagtgttgagtaggtgatgtctttactttttttttttttatgttttttagacggagttttgctcttgttgcccaggctagagtgcaatggcatgatctcagctcactgcaacctccgcctcctgggttcaaacaattcacctgcctcagcttcccgagtagctgggattacaggcatgtgtcaccatacccagctaattttgtatttttagtagagacagggtttcttctccatgttggtcaggctggtcttgaactcgcgacttcaggtgatctgcccgctttggcctcccaaagccctgggattacagacgtgagccaccacgcccagccttttttttttttggagatggagtctcactctgttgcccaggctggaatgcagtggcacaatcttggctcactgtaacctccgcttcccagattcaagcgattctcctgccccagcctcccaagtagctgcgattacaggcgtgcgccaccatgccgggctaatattttttttttttttttttttgagacagtctcactttgtcaccaggctggagggcagtggcatgttcttggctcactgcaacttctgcttcctcggttcaagcaattctcctgcctcagcctcccaagtagctgggactacaggcacatgccaccacgcctagctaatttttgtatttttggtagagacagggtatcaccatgttggccaggatggtcttgatcccttgacctcgtgatccacccaccttggcctcccccaaagttggaattgcaggcatgagccaccacgcccggccgactttacattttaagagcataaaactacttttccctgtatggttttttttcccccccaagagacatggttttgctctgtcacccaggctagagtgcagaggctcatgatcacaatcactatagcctcgacctcctggacttaagccatcctcccaccttagtctcctaaagcactgggattacaggtccccatctattataagatgtaattgcacttaatttgtagacatccttcaagtgatatgtgggtgaccatttaaagatacaaaaaaggagcacatggaaatgggaggagccaactaaatatcaggtcctgcactgggctccagtggttgactgtgttagtcccgggcaagagcgagggccttaacactgccaaggatgctggatgagacctggttaaggaaattgaacatgttttgttcagatgagagatgatttggggtgggggtggtggcaggttccggaaggccccaggatcttggctcaagactggactgaaggcctttcctgatgctggcaccaggcaggcttgctcactcccttgggaaatacagagggggttactcttactttccagagatgagatcaggtgaccctattgcaaaaggcagcagaagtggacagtggctacctggggaaggagctcagcattgagtgagcagctcagaatcttacactcaccttctatgaagtttaagatgaagggagctgctctactctgttgccttggtttattgcattagggaaaagaatacttaaattgcttggaaaaattggagtagttttgagctgtttagccagtcttctgagtttgtaaactactcttggttgtttttttttttaaactttttttttgttttgaggcggagtttcgctcttgttgcccaggccagagtgcaatggctctatcttggctcactgcaaccttgtctccagggtccaagcgattctcctgcctcaacctcccaagtagctgggattacaggcatgcaccaccatgcctggctaatttttgtatttttagtagagacagggtttcaccatgttggccaggctggtctcgaacttctgacctctggtaatctgcctgcctcggcctcccaaagtgctgggattacaggtgtgagccaccgtgcccggcctaaaacttattttttaaagttaatccgttgacattttagagcttaagctgcttcggcagataccctgtggaatgaaatgcagctgggctttgcatcaccacacagtgaagtgactggtgtaggagatgtgttgctggctgtaggattctctaagcagagcttcttagttggtgggctgggatgagtgacaggggtgcagacgtccttgtgggtaagtggcccctgcccttgaccagctccttaggctgagaatagcctcatcttactccagtgtcttccacacttagaattcttactacatggcagaagctgaaaaagatggggcatctgattacccccccacccactattctgagaagagagatgatttttcttggctctctcagtctcagggtatccacagctcctgtggagaaggggttcctctgcacgctgcactagaggagtgttgggtgcggggggtggagttggccattcaccctcctggacctcaggatttatggaaagtcatactgggaactaagggcgaaagcacaggttgctgtggttattgttgatgtcctgaaacaggagactgttcatacttcactctcaaaatatggagagccctcagaggtttctgagcatgacaatatcgacttgaattgggcagaagaaaggccattgataaaaggcaggcatgagctaatatggccttggatttgcctgacggaataaaaagcagggacaggtgccagagacactgcaggaagattgggtagggattaactggataccaagggctgaggacagttcatctgtttgacaactgttggagtgccttccctgctcgaccagtgctgagccccaggggtgtctggttgtgagggagattcctgccttccggggtcttagagcctcgtgggggaaacagggcagggtgtcatgatgcagacatctggggcactcagctaaagggcgggcaggagcggtgtcgtagcagtggcagctgaatgacgactggagggtgacataggccctcagattgtggatctttggttttaggggtagtgagctaggtcctggagggtgctctgggacagctgggtattggccctgggcagtcattgtcagctgtgatggccgaggatgcagtgggtgaggtgtggaggccccatgtgaccatcaggaccttcatgaatgaagagagcatggctctctgaccccatctgactggccagctccaggggcaggtgtagaatttgatccgtcctcgtgtgtccccctctccaaactgtagtgctttgtgttaggtgaaagtgtgacaagtaatagttgaaagaatgaaatatccaagggaccatctccatacattggaaaagtttgttctgctctgttcctatgaatgaaatagcagcagatggatggaagttcgaggaacacagacttgacttagcctgagaaagatctttgtagcagttggaggtatcgggaagaggctcagtgtgaacccagagccctgggagctggttgggaacccacattttctagatttctgaggattttccagcttgaggttttggacacttttccagaaagacccagagcgattaagacacgtctctgaaacaaccacatgaattattctaacagctgctgcttgctggttttaggaagtttccttgtttcatgcactgctcaaatgttttcagattctagctcttttggcagagtttgggggagaagacaggtgggtgtcccgctgtgacactggttttgagagtggggaggggttgtggtcgccggaaggaaaagagccctggggatttgccacttgggtaaaaatgacttggtatctgactagtaatcaccaagacccaaacagggtcattttggggtggaagtgaagtatcagatgagttaggtgggagtgggctgggatgtactctggctactgcccactccaaaaggcctcctagctgggcctgggctgtctctcagggcctgtaccctccaccatccttgaattcagtggccagggaacccgtcccctccccctggtctgtgcctgctctgctcattgcctcacatgtgtgagcactcggtggaaggaggaagggatgtctgcacacactccctgtcgagggaccctggcttgctcctgtggtgccctaagcatgtagttggcatgcatgtgtgtcacaatgaaaatgaagatgagaattggtcctagtttatgacccaggccgggtagtatttgtcgatccttccagccccttcctgcatctcgtacactggcagacagggactcagaggccaggtggctgttcctgcccatggaactctgagggtttccatgccttctacagctgggctcagtcctgggagtttctagcaattcagtagagggttaggttaacgtgcacttagaggaatagaggaatcctgggtctgtaatgatctctacatcttttttttttttttttttttttttaagatggagtcttgttctgtcacccaggctggagtgcagtggtgcaatctcagttcactgcagcctccgcctcccaggttcaggtgattgttgtgcctcagctgctcgaatagctgggattacaggcacaagccaccatgcccagctaatttttgtattttagtagagatggggttttgccatgttggccaggctggtcttgaactcctgacctcaggtgatccgcctgccttggcctcccaaagtgctgagacaggtgtaagtcaccgccctggatgatgcctacctacatctttggtagaggaagttttcccagagccttgggaaggatccagtcctaggaccgtctcaatcagattgttctcaatggtacagcggttcaggtttgagcctgggcctaggaggtggctgacctgggtctggattcccatctgacttattaagtgtgtgaccttgggcaaccatcttgactttttttttttttttttttttttgagacagagtctcactctgtcacccaggctggagtgcagtggtgtgatctcagctcactgcaacctctacttcccaggttcaagcgattctcctgtctcagccccctgagtagctgggattataggcacgcaccactatatccagctagttttttttttttttttttttttttaagtagagacggggtttcaccatgttggccaggctggtctcgaactcctgacctcaggtgatccgcccgcctcggcctcccaaagtgctgggattacaggcgagagccgtcgcgcccagcccatcttgacttttttttttttttttttgatacggggtctcgctctgtcacccaggctggagtgcagtggcgcgatctcggctcactggaagctctgcctcccaggttcccgccattctcctgcctcagcctcccaagtagctgggactacaggcgcccgccaccacgcctggccaattttttttttttttggtatttttagtagagatggggtttcactgtgttagccaggctgatctcgatctcctgacctcgtgatccgcccgccttggcctccgaaagtgctgggattacaggtgtgagccaccgcgaccagccccatcttgactttttttaacctcggttttctcttctgtcaggtgtggatatcggcggtagtcccttgcatgaagtgctgataacagtgtgggttccatcgtgtgaagtgtgggtacgatgacagtccctcgtgtgagtgtgggtatgatgacagtccctcgtatgagtgttggtatgatgacagtacctcgttctgtggttatgaggattaaatgaaatcaggcatgtaacgtgttggcacattgcctggcaccaaataaagaattcagtaattgttagccactgtttcctctttcagtaacaaaacctcttgtcaacatattagagatgattctcttggtgtccccaaagttttcagaagtgcgcttttctctagcagtttgaatccaggtgcctagcggtaactttctccgttgagggtcaggtcctccccatcctgcctcagcaatgcccgacggacaatgggggaggcctggactgtgaggatgcacgagcagtcccattctggggacagagacaagcagggcctggcttggctgcatgttagtgctggcataggggttaggtagggtctggatctgcttgaggtggcttgagatagagggagggagggccagggaggtgagggcagtaggcctccttggaggaagagaaggctggcccagtgaaagccagttgaatggatgagtgaactaacgcccctgcccctatggccctgcccctcctcaccccttctggcctgtactgtcccttcgcctgtccataccagtttcccagggcatgtcttgcatgtaggttgggttgtctaggcagcgctgtgcttcagtgacactttgtggttgacttgggaccctgaccacactgagagcagcgcgcttctctgggttggatggctgggttctcaaggaccaacggcttagaattgtggagggtggagtgtgtcccggccctgtgtttgtttgcctgcctgctgacatgaagcctgatgtgtgcagccactctactgtgtgcgagggaagaaagacatcctagtccgtgttggacatgggctctgtgtggcagagttcagcctcttgtggggccccgtcttactctgggggtgatgcaggtaaagtctgctgaggacctagcctaaggctgtgtagtctgacagatttcttcagaccttctctctcttttttttttttcttcttttttgagacagagtctcactctgttgcccaggctgggagtgtgcagtggtgcaatcttggctcactgcaacctccaccccctgggttcaagcagttctcctgccccagcctcccacgtagctgggattacaggctcccaccaccatgcccagctaatttttgtatttttggtaaagactagggtttcaccatgttggctaggctgatttcgaactcctaacttcaggtgatctgtcctccttggcctcccaaagtgctgggattacaggcgtgagccactgcacccagccagaccttcttatttttaggcagtgattctagtgaaatttacattgttctttataacatatcagcattttcatactgaagcctcttcccagcaaggaaaacgccatttgaggcagaaacagcaagcatatttcaaggctctgggattgcttgcttcccaccgcaggaggcaggcggtttggcctttgctatctggctcctcttggagcagggttccccaggtgccagcccccaccagcacagtttttctctctgcttgctccctggaagctggctgttgggccacacaagcagaactcctcctagctggcagagccccacgtccacctggcacctgctttccccaagcctcggtgtcccttctgtgacatctaagacttcagggaggcattgcttcctccatcttggcctcagtttatcctgtaagggctggggatagtggtgaggacagttgacagttctgtgaaacactctgaggagcccttgctcttcttgcatcttccaatcatacttttattgtctgatactatacattgtcaaggaggtgtggagtatgtgtacagccttgcatttctctattctttttgtttttgttgtttttttttttttgagatggagtctggctctgtcacccaggctggagtgcagtgacgcgatcttggctcactgcaagctccgcctcccgggttcatgccactcttctgcctcagcctcccaagtagctgggactacaggcgcccaccaccacgcccggctaattttttgtatttttagtagagacagggtttcaccgttttagccaggatggtctcgatctcctgaactcatgatctgcccgcctcggcctcctgaagtgctgggattacaggcgtgagccactgcgcccggccttttgtttgtttttgagttaggatttcgttctgtcatccaggctggcgtgcagtggcacaaaaatggctcactggagccttgacttcctggactcaagtgatcttcccacctcaacctcccgagtggctgggattgcaggtgcgcaccaccactcccagctaatttgaaaatattttgtagagacagagtcccattgtattgcctaggctggtctcaaacgcctgggctcaaagcagtcctcctgtctgtctcccaaagtgctgaggttacaggcatgagccaccacacttggcctatttctctcttaattggcgtatgcggtggcggctgagatttgctgatagattttgccattgttatagtttcttcatttatactttgcagcatttcagtcatcacatgatttttgtgatggctgtggtgcgtcatcagtttgccgcagtgatgaagcttctgggactaagaaccagcttgttggcctggttcttgggcaaggccctgagaatcctgggctgaatgcccccctgagctgaccacgtggccttagccagggccattggtgccatggcgtggttagtggatggttccagccaagtctgagaatttaccgaattgactgtttgatttggcagctgatggtcagagaaattgaattctgcctcttagcaaaggaagcttggtggatttctagaattctttgttgtagagggggttggggatggcgtgggcagaatgaatgcgaagtgtgggggcttgaggtctgccaggccctcccacttgccctaaactggacttggaggtgtctggaaggttgtgggtggacagcactgaccttgctgcttggccagttgttccccagccactctggattcggatctaggtggaccctatggtatcctagaaactacctttatgttcttttcttttaagaaacagtgtcttgctctgtcatcctggctggagtgtagttgcatgatcatgggtcactgtaacatttaaactccagggctcaagtgatccttccacctcagcctcccgagtaacttgggactacaggtatgcaccaccacacccagctagtttttaaattttttatagaaacagggtctcactgttttctagggctggtcttaaactcttgggctcaagtgatcctcccacctcagcgtcccaaagggctgggattacaggcatgagccactgcatgtggctttgtaagtttttgttgttgtttttgatacagggtcttgctctgtcgtccaggctagagtgcagtggcgtgatattggctcactgtatcctccacctcccaggctcaagtgattctcctgcttcagcgtcctgagtagctgtgaccataggcatgagccagcatgcccagctaatttttgtattttttgtaaagacggagttttgctattttgcccaggctggtcttgaactcctgagatcaagaggtctgcccccctcagcctcccaaagcgctgggattacaggtgtgagacactgcgcctgacctccactgagtttttaaattttttgtagagatgggggtctctctctgttgctcaggctggtctcgaactcctggcctcaagtgatcctcctgcctcggcctcccaaaatgctgggattacaggcatgagccatcatgcctggcctggcgctttacttttgaccatgtgacacacctgtggttggggtctggggcctcagaggcagcgactgtgctgtgcattggtgaaggaagcatcctcacctttccaggaggttgcccatatgacaggttaggtgttgttcctgcttgaaaaacaaacttgagctgggtgtggtggcttgtgcctgtaatcccagcactttgggaggctgaggcaggatgattacttgaagctaggagtttgagaccatcctgggcaacatagtgagatcccatctctacaaaaaataaaaaaggtgtggtgcagtcattgacacctataatcccagcccttttggaggccaaagtaggaggattgcttgaggccaagagttcaagactagcctgtgcaacaataaaaaaaaaaaaaaaacccaaacttgagaaaacttgccataagaatagaataactggaggttttatttcttggcattaagtgaacaaaacccagccactgaccgtaaaggtaatacaattagttgaaatattgcagtgtggggaggctatttgggtggcaatttgttggggacaaggctggctgtcattagaaccttctgtgtgcattctcctatgatggaggcagtgtcttctgccagatggagccttttgggatcctcccaaatttttttattttgactggtcctggccattcggctgttccctcccctcccctttattagagtcatcccaagaggactctgtgctttgtggtcacaggtcacacaggtgcatgtgcaaaggagatggcctgtttagaggtgaatgaggtgggagcaccagatagttgtttaccccctttccccttactctattcaggagcacttgaccaagccataattagcatgctttgcacatttccaatctgaaatgattggcaaagaaatgcccgctctcttgttccagttgggtacctcaggcggggtcactgggcattttgtttttcacccagcatctgtggactcagccacacaccggcctggcagacagctccccagtgcagcaactcccatgggcccaagggattataggcaggcttggagctcagaacttgacaggggacatagtggttttctttttcttttcttttctttttttttttttagacaaggtctggctctgtcgcccaggctggactgcagtggctcagtgtctgctcactgcatcctccacctcctgggcttaaggcatcttcccatgtcagcctctagcgtagctgggactacaggtgctccgccacgcctggctaatttttgtattttttgtagggatggtgttttgctatgttgtccaggctggtctcgaacttgtaagctcacgcaatccatccacctcggcctcccaaagtgctgggattacaggcatgaaccactgcacctggcccctgcagacatagtggttttctttttaatgatgttaattagtaggggcactatgggtgggttgtctggagtttcccttgtctagagttagatgtgatgggagctcagggctcatacccagccgtgggtccatataagtcttcgtgtgtctagcttgggtgctccaggaagtgtatttgggatgtctctggcttctattccacaaacttagaggagaagtttgtacccaagatgagctagtcatctccattcacacaacaagcattccttggcttatggctgtgagacaaggctagagtccccgggaggtactgttcttctgcagctaagagctgggatcaggccggcagacttgtccatctatgacataatgtgtggccgctgctgttacctcaccattccatgtgtttccagtgctttttaatttaatttttatttttttgagatagaatcttgctcttttgcccaggctggaatacagagatgcgatcttggctcactgcagcctccgcctcctgggttccagtgattcttgtgcctcagcctcccgagtagctgagactacaggcacacacccctacccctggcaaattttttttgtatttttaatggagatggggtttcaccatgttgcacaggcaggtctcgaacttctggccgcaagcgatccacccgcctcaacctcccaaagtgctgggattacaggcgtgagccactgcccccggcctccagtgctttctttatgcggcttatttgagaagcggagggaaggactagttggtagtgaagcatgtcagtggcatggctgagctggggagcagagtttcagaaccatgctttgtttggcaccatgggtataccaggctcatgtgctttttttctgtacacgctttggcatgtgatgtgtgtggctctgccttgaggacattatgctgagtaagagaagtcaggctcaaaaagacacacttatgattgcacctatatgaggttcctagactctcaaattcttaaagacagaaggaagaaggggggttgccaggggttgggggcagagagatgagagtgagtatttaatggggatagagtttcagctggggaagatggtaagttctggagatggatggatgatggttgcacaacagtgtgactgcacctaatgccactgaactgtgaactcaaaatggttaagatgtaaattttgtgtacgttttaccacaataaaaaaatgaacctttctgaattcagaaatattctatacctttatgacaacatgtattctgtcctctcagaattagcttggggacaaagggacaaaggcacacacactcatttcctagcttgtgctaagtactgggggtgggggtggggttaaaaaaatgcacgtggttctagaaggctcttaatgacatcatcttgggatcacaatgttagagtgcggatattctatgggttttcttcagtccctggacaggtggggtcatcctaggacccctgcaatctttaggggatttagggagaaacagtgtccaggaacatctgaggtctctgttcccgtgcattgcttggggattgaaggtatttctttctttctttctttttttctttttagatggagtcttattctgtcgccaggctggagtgcagtggtatgatcttggctcactgcagcctccgcctcccaggttcaagcgattctcctgcctcagcctgctgagtagctgcgactacaggcgtgcgtcaccacacccagctaatttttgtatttttaatagggacatttttagtatttttagggttttaccatgttggccaggatggactcgatctcctgacctcatgatccacctgcctcagcctctcaaagtgctgggactacaggtgtgagccaccgtacccagcctcgaaggtattttttattttcctatatctgtttgtcagtgagtttcctttaatacagcagtgtgttggtatttttattttatttttatttcgagaccagttcctagatcctcagtattagagaagtcatttcctcttttgttcttgtgacattttcttctggtgtcctttaatactgcaatacatcaggcatctgaaatactaaacacttaaatgtttcagacacttcctaaggcctcagtgtcatctgcacgtagacatttggtttctgggcacttaagatctggggtcgataggcagtttaggactgctgcatgcactgcccaggcagctgctgggagcctgggtggaaacaataagaggagcatccagatagaggtagcaatgttttgaggaacaacattaatcataataataaaagaaagaagtagttgcttctgtttgagaagctgcctggtgccagggcctgtcactgggttctcaggatggtctggaggcctgaggtaggttccacgcaggcaggcaggctccccgggagggcattgggcccactgtttaactgccaggtgagccaggctgggcagaatgtgctaggaggaagctcgtgagcatttgggatggtttggagggaggcctggagtgccagggagcgagaggggtgtggtgctggagtctgagcttaccagagggcagggctctggacccgcatgagaactgtgaatggggttttagggtgggacacagcctctgccataagaaaggatacggggagtgcagagtgtgggcaccactgacactggggcaactctcaattctcagtggtggcctgagggaagcccttcagacacagggtccccacagctccccaaatagcatgccaggggtggggcaggagggggacattggccgcgccccgaagctctggactcaccccaggggctgtgccgtgcccatggctgtagtcttgcctatctccatgtggcttcttcctggcactgattaactattttaattaaagacagcatttgtatgtttttttttttttttttgcctccagccggtggtagaaacctcttggttgggtcctgacaactcgtggaggtccccattttgtagtctcctcctccgtgcccacgtgggtgttagatgaggtgatgcgcaagcgccttgtgtccatggagcatggagcctttgggaagtgggatgctcgatttcaagtagcaagtttcagcaaaaagttccagcatcgtggtccatggtgaggggctgggggggagagcttgcctgagtaacaggtgcttgaacccaaaggatgggtgggagctaggaggggctctcctggccatgggaacggtgcgtgcaaaggtctggcacggggagtaggcaggcgtgctgggtctgaggaattgaaaggaggccaggtggttggagcgggagcatggaacgtgtatgctccttcacatgcacgtagcgcacttgcggctgaagtgggccgggccttgaaggccgtggtgaggtgctctgacgctgggtggacctgggaaattaaggagggccgtctggtttattatggggagtagaagatggtggaagtggaagacagccagtacatgccttaggctgccggcctgcccctgcctgtctcctccttcaaggaggctgtggttcccatggctgagggaggagacaggcaggggcagaccaggggcctacaacatgtactggctgtcaccctaatgggaagctcagtttgagagcagaggtgggaactccggcctccagtgccagctctggttgccaaggatgggcttgtgtggccaacctcacgattgggtcttggtcctcccggggctgattctccgcatctctagtctgccaagtcatactcttccccacagagggttgatggggctctgtgccttggggagagcggggactgctcagggaccgacctgaacacctcctcaatgtgcctctcccctgacttcttggcggcagcttgctgctgtggctagggctacctctgtctttttactgagtagctcattgggcagtttcctcctgatcccccttcaaatctcagtattgggatttgggccttatggtctctgttgttaaaggtggaaacagccatagacagtgtgttcttgagtactgacatggctgtttcccagaaatacattatttactaaggtggcaggcagtagtgtgctgaccccagactggaaaactggatctgtggcccctgctaattcttctccagccagccagccagcgcatggtagaccagcctgacttctgggcttcctcaggatgatctgctgttgccttgcttcagttttttctttccagattgagctggggacttccccacattgaaagtttgatgggaccattagcaaagagggtctgggtgaccctgtgaagggggcattcagtttgtgcaggacctaggagaggggcgggagaaggtgaacggtgttgttgggtttcaccttggatgttgttggccatgtcatgttcccaggattggactggagccaagctgtgtttggatgcagaactagttgaaaaattctagagacagcacaagtttttggtgactacagatggtgataggtcagtgggtctgggcccagggaagggacaacggggcttcctaggggcacctggtagagcccatgcttccggatcaggtgctgacagctgcagagacaccatcactgtaccagccatgggtgccgcaaccccagcaaccccatggaaccggagttccccaggtagtggccagtgtcaggccatgtgtcctttcctcaaattaaaaggacctcgctagcctgagcttgagaggataaaatggcaagaaaggacttctgttgcccaaagtgcagtgacttgatttcatgtaaattgccatagctaccttctcaccaaggctgatcttccctcagtttgagaagtccttgtgtttgggtgggttgtatggtaggggtgtgtgtgtgtgtgtgtgtgtgtgtgtgtgtgtgtgtgtgtagtacccaggtgcaaggtcaaagccaaaccataatgatttatcaagggagcggaagagtctcttatgagctggtaattgtgcacttaagggttacttgatactgctttaaatgtatgggttggagataaaaacagtaaaagctctctgaactcagccagtacggggtggatggcaaaacagtccaaatgatagattagtggaaagcgattacagtgtattttcaagaaatgctgctagttgtgatcatgctgagtggtcttctgcttggtttcctcctctgtgaatcttgcactgattgtattgcagggctcctgcagtgggctcctcagatcggccccttctccttcagggttaaactatccctgctcgtccattcaataaatatttattaagcggctgggcgcggtggctcacacctgtaatcccagcacttcgggaggctgaggcaggtggaacacaacgtaaggagttcaagaccagtgtggccagtatggtgaaaccccgtctctaataaaaatataaaaattagctgggcgtggtggtgcgtgcctgtagtcccagctgctcgggaggctgaggcaggagaattgtttgaacccaggaggcagaggttgcagtgagccgagatcgcaccactgcactccagcctgagcaacagaccaagacttggtctcaaaaaaaaaaaaaaaaaaatttactaagcaccacttatgtgtcagacactgttgtaggtgcttgaactaaaatcgggcatcaggcagatacccctgcccttgtggtgtgtacgttattgctgggtgagaaagttcatcggcaacacagtagctgtgttgtgtggagtgtgggaggggtggtgctgtggaagaagaggagcagggtcgggatggtgggcctctgtgaggagacatttgagcaaaggcaggggtggtgggggatcacacggaggggttaattttttatttttatttattttgagatggagtttcactcttgttgctgaggctggagcgcaatggtgcgatctcagctcaccacaacctccatctcccgggttcaagtgattctcgtgcctcagcctcccgagcagctgggattacaagcatgtgccaccacggttggctaattttgtatttttaatagggacagggtttcttcatggtgtccaggctggtcttgagctcctgatctcaggtgatctacctgcctccatttcccaaaatgctgggattacagacgtgagccactgtgcttgacagtggtttttgttttgttttgtttttgtttttgtttttgttttttgagatggagttttgctcttgttgcccaggctggagtgcagtggctcaatttcagctcactgcaacctctgcctcccaggttcaagcgattctcctgcctcaccctcccaagtggctgggattacaggcatatgccatcatgcccggctaattttgtatttttagtagagacgaggtttcgccatgttggccaggatggtttcgaacccctgacctcaagtgatccaccccgcctcagcctcccaaagtgctgggattacaggcatgagctaccgtgttcggctgacagtcgttttttaaaggtcgttttcaattcgggatgcagattgaatagttaattgatagatgaaatgacagaactaggattttgtttaaaacataaaaagacctcaaagtggggagggtcctagtgtgttggaggcacggccaggaggccagtatggctggaacagagtgagcaggctgaagtggggatgggatgcttgggtctgcaggcagtgtgtgggcctctggggttaggagaggatgggcttcactctgagtgaactttgagtccacgagtgaaagcagagaatatagtttggagacctccatcccagtagaggacagtgtggccagtggaggtgtgaggagtggttgggctccagatatatttaatggcagaaccaacaggctttcctgagtgactgggtggtgggtggagtctgcccaaggggacaactccaaattttaattgctgggagaatggatttgccacaagctggctttgaaagcagtggtagagtgtgaaagaagttaccttaagacttcttgccagttgcactgtaggtacgatgtactgtttgttgtgatttgactttcctccaccacccccctgccccaggaagatgtgatcttgtgcatcttgtgttcacgcagagtagggtagttggatctttgtcaagtctcagtgatccacatgcgtgcatctattttgtcagtctgcttgtctttgtatccatgtcatactgtcttgatgtagctttatgttaagtctcaaaatcagttgtggtaagtcctccaaatttgtgcctgtttttccatgttgttttcgttattctaggtccgttgcacttccgtgtagattttggaatcagtttgtcatttcttcaaaccatctgctgggaatttttgattgagattgcattgaatctgtagatcagtttgggagagaattgataccttctgacccatgaacaagacacatgtcttcatatacttcagttttctttttttttgttttgagataaaacagtattttacacaagtgaggctattgtgattgattcatgcaaacaacaactttagaaacatcttttaaacatgttcagagagtgtataacatacaacagaaattgatgaaaagtgtaacactaaaataaaattattctcatttattactgcaaggagtacctccccataccccccctttttttgagacaaggtcttgctctgttgcccaggcaggaatgcagtggcacagtcacggctcactgcagcctcctgggctcaggtgatcctcccacctcaacctgagaagtagctgggacctcaggtgcacgccaccacacccagctaattttcaaaaattttttttgtagagatggggttttgccatattggccaggctggccttgaactcctgagctcaattgatctgcctgccatggcctcccaaagtgctgtaattagaggcatgagccactgtgcccggccttctttcatttttcttgttgtttcattgtagtttctttatccttaagtatttcaccttttttgtgctaatgtagatgacttttttcaggttttgagttctgattggtttgtgcctgtgtgtagaaacacagctgattttttatatatagaccttgatcctgcagcagaacagcacaggacacctgcttctgaggcttcccaccctcggggcagagaggtcttggattggcagatacaaaatagttaggactaatgctgcccattgggtttctcagcttgaatggggctaaaaagagcggcagaaagggttcttcctgaggagctagccctgtgcctcatttaggaggtgcctaaaggtctttccatagagttcactggtgttgtcccctatccttatttttgcaagttctcctgtgggagtgtttctcgccatccatcagctgtgaattgccgtgaacctagtttaaaaataaaggtttcatatcagagcaagctcctggtagtcctgtgggtgcaaagaatgacaacagaggtgatgttgacactatttggcaagctacaactgacagaactgcttgggaatctgggatttggctggttcctaaggttcagcctctggcccatagccctggacgtctgatgatacaaaccggaagtggaagtccgaggcattttctctatgaccttggaagagaagttcctgaatattgtagagcattagttttcctgtctgtaagacaggcagcctctttctctctggacagcatcccatggggatgaccatgacctttggttttggaggtgaagccctctcggtctggagggtgaagtccgctcattcccaggcacatcatgccctcatcttgagggtaaacctagcactgccttcaccaggaatggtggctggtttccctggggtccatgacagacaacatgatggtgaggaggttacattgggagaatgagccctgcgtgctgcctgtgtgctctgtgaccctgggcaagttcctgaagatcagacacatcagatcccttatctgtaaaatgggcatgatccaggaacctgcctctacggttgccttggggattcagagatgctgtgtgagcatagtacctggaacatactcctaagtacctattaaatgctaggtttctgggttgttttttgagacagggtctcactctgtcgcccaggttggagtgcagtggtgtgggatcttggctcactgcagccttaacctccctggcttaggtgatactcccacctcagcctcccaagtagatgggaccacaggcacacgccaccacacctggctaatttttgtatttttttgtagagacagagtttcaccatgttgcccgggcttgtctcaaactgctaggctcaagcagtcctcctgccttggcctcccaaagtgttgggactacaggcgtgagccactgtgcctggcctgtttctgtttttaatgtcattactattataataaaaaccctgggctgggcacggtggctcatgcctgtaatcctagcactttgggaggtcgaggtgggtgtatcgcctgaggtcaggagtttgagaccagcctggccaacatggcaaaaccccgtctctactaaaaatacaaaaatcagccgggcatagtggtgggtgcctgtagtcccagctactcgagaggctgaggcaggagaatcgtgtgaacccaggggtcagaggttgcagtgagccgagatcgtgccacttcactccagtctgggcataagataaaaataattgtatttcatcgtgtgactgctttttatgtcaccatctgtattggtgaagacagtgtctgggacgttggcgttcattggttagcactgtattgtttcatacctcagagatcagtagaaatttgtttcctccgactgtccccattgtggaaggtagctgaggcaaaactcaggaaatctgaaattttgctatgtaattccaggggttagagacattttagaaatgccagtatgttccagaaaccttgcttggaaacacagtgtttctttctctgtcctttgctttaggttggtcagcacattgtctcaagtagccttttgatgtcactgtggccatggccaactggtaggaccagcaccccataccccgaagccaggtgagtgcttggggtgtagtgtctgtggaaggaaggttccacgcatccagcaggcttcggtcagcttcttggacactttaaagtgagtgctgcttcagccacctcctagagaagatggagggaggcaggccccctgggatcgcacactgtgcagtctgtatggggctgcctggcccgtcccttcaggcctcagggaaaaagaaaccattctgattggtcattcatttgaaaaccctaggtctaaataagatgagcctgtcctctctgaggggcaggggcagaggataatcctggccagtggcctttgccctctggccattcccatgatttcccagcagtgatagatgccgttagactttttccttattcaccgcaaagcccagggccccacactggttcttggagctggttgcccttaccttgcctcgtgcctcatggcaaagctaagctgcccccgctgcgtggagctcttaggcagagactgtcaagagctgtaccagggcattgctgggtaccttggattttctctgttaccatcaagcctggtcagcgacgttttggcccaaggctacctacctggagaagaacgcagaactgaaagatgtcttagaacttggaggcagcccctgggtcagctgctccgttttatagatggggacacacatgggccagagttggcaggtgacttgcctagggattcatgccccatcgaacaggatcttgccggtcacgcagtgtgagatgtggctgctctgctgaccatggcacagaacaagtgttgcggtcagttttgtgaggtttcagctcttcatatggcaagaaaatatgggcatagtcaggtaattctgttgtcaggaaaacatttccagaatgttctccaaacaaaatgaaactttcgtggtacttatatttttattttttatgttttgagacagggtctcactctgtcacccaggctggagtgtaatggcatgatcatagctcactgcagcctcaaactcctgggctcaagcgatcctccccgcctcaggctcctgaatagctgggaatacaggcgtgtgcaaccacacccagctaatttttgtattttttgtagagacggagtttgctgtgttgcccaagctggtcttgaactcttgggctcaagcgattctcctgctttggcctcccaaagtgttgggcatacaggcaaattacactcaaaaaaattttttgagatataatttgcataccatacaattcacccatttgaagtgtgcaattcagttttttatatatattcaagagttccacaattaccacctttatttaattccagaacattttcattatcccaaaaggaaacagcatactcattagcagtcactcctcatctccccctcccctttctactgatgacctctaatctactttctgttgatttgcctgttgtggacatttattgtaaatggactcttatacttgtgtaagtggccttttgcgtctgccttctgttagcgtggttcatccacattgtaagcatgaatcagtgcttctttcctttttatggctgaatgatattccattatatggatgaaccacattttgtttatccattcattcattgatggacatttgagttgtttctacttttttagttattgtgaatagtgctgcttttaacattcgtgtacaagcttttgtttgaatgcctgtgttgcgttcttcttagtatatacttaggggtgcagttactggatcatatggtaactttctgttaatctcttttcaggaattaccagactgttatccatggcgcctgcactattttacattccctgacacttacacagggctctcaaactctttggagacaagttcagactcaaagtctgtgccagtttcctacagagagttgagacttgtcagagcctattacctggtgctgttgtgctgtaactactatttgggggatgtcaggcattgacagaaacagagggtaggactagggactcagagtcacaaagccacatggctctcatcatgttggctcacctcctttttggagataggctctcgctctgtcacccaggctggagtgcagtggtgtgttcatggctcactgcagcctcaacatcctgggctcaagtgatctacctcagtctcccaaatagctgggactgccaggtgtgggccactgtgcccagcttgagctcaccccctttgttgagggggaagcacccacagccagcccagggaagtgagtgactgcctcttgtcctgcagcccagggcattgtttgagggcagcagggctggctgtagtttctcctaggccccaggctgggtacccacccctctgcctggccctttcttaactcagaagcacatggtctgagcagtaggtacttgttcaatgaataaatgaatggaggaaacctccctcttctctgttgccagccagcagggaagacccagccatagcattcaggcagtcagtttgggagttcagaagggaatttccagaggccaccccaggttttcctttggcctgtgcttgaagggacttgatagaaaaggacagtctataaacagtcgtggcacatgatacttagtggtcaaataggcggaagccacccccgaataattatttcttcaggacttataaatgtgtcagcttgtgtgcactttttgttgtgggtgtgtaagacagcccagcatattgatagattttaggttttctccacaaaatgcaagtttcacccactcttgggtgtgtctcactcagcactagcccacacttgctttaagtggaaattatggactgtgattggctggggtgtccccattcctgtcacccaggaccacatgagcacagtggagggagcagggccggaggagggctggccctcaatgtgcccagcagctccctcccatgtctgaggcacacagtctacacacaactcccacttgtgtgtacatttattcttatgggcacaggggcagtcttgcctgttcatggacttggtgtctgcccttgaatttggcctgtcaggtcctctttgttaagcaggcacgcactgcctagtgctgggtgttaaggatcaaaaaatgggtgtgactgtagaaaaacagattgcatcacaggacaggtaatgcacatgggcctggaccaaggtgtgaatgatgctcagtctttctaatataagaatcctgcacgttggagcaccaccaagacatttctgggttggcaagcacatggagtagacactgttctagtgatgggagtcaggtagtgccgtggtagttgcttttggaattcacaacttctctcaggggtatttgcaacatctagcaaaaggacaagtggtcaggtgcggtggctcactcctgtaatcccagcactttgggaggctgaagcgggtgggtcatttgaggttaggagttcgagaccagcatggccaacatggtgaaaccccatctttactaaaagtacaaaattagctgggtgtggtgatgcacgcttgtaatcacagttacccggggaggctgaggcaggagaatcgcttgaacccaggaggcggaggttgcagtgagccaagatcacgccactgcactccagcatgggtgacaaagtgagaccgtatctcaaaaaacaaacaaacaaaaaacacaaaaaagcaaaaagacatgtgtttactctttgctccagcaaatccacttctggaaatgtatccgaaacatggtcagaaataaggaaggattacaaggattgtgttcattacaacactccggaaacaaacaaagctgggaatgacttagatgtgtcagtgttcagactgggcaacttgtggtggtggctctgcctacagggtggtgcctgagcccctgagtgaagggaggaaggagtaggtgatgtcttcatttgtggtggtgatgggatttctagttgaaatgacaagcagaaaaaagaacaatgtaaaggaagaagagatggagtgtgctgtcacttatctaaggaaaggtggggggatttgctcattttatttttatttttatttattttttatttttatttatttattttttttgagatggagtcttgctctgtcgcccaggctggagtggagtggcgcgatctcagctcattgcaatctccgcctaccaggttcatgccattcttctgcctcagcctcccgagtagctgggactacaggcgcccgccaccacgccctgctaattttttatatttttagtagagatggggtttcaccatggtctcgatctcctcacctcgtggtctgcccaccttggcctcccaaagtgctgggataacaagtgtgagccaccgtgcccagccactcattttatttttatacaccataaaggaaccacattgtcacctccaggagaagggatggagagggcactgggagactttttcacgtgtcctttctttgtagcatcatgtacgtgcttcacataattataaaacaaaagccaagtggtggcagtggaaggggaagcaatcccttaaaaaccaaagacaaaaatgaatgaatctaggtacatgtcagttgtaacacacattggtgacttaacctctcagaacttatttctgataactttaaaacgtagtttgactgtaaatgttttagcgagatacccaataaaggtaaacaaatttatttccttctttccttcccttcctttccttccttccctttccttccttttcttccttccctttccttccttttcttccttccctttccttcctttccttcctttccttcccttccttcccttccttcccttccttcccttccttcccttccttctttccttcccttccttccgttccttccctcccctcactctgtcacccaggctggagtgcagtggtgcgatctcggctcactgcaacctccgccttcacgtttcaagtgattctcctgcttcagcctcccgagtagttgggattacaggcgcccgccaccatgcccggctaaaaacaactttcttaaaatcttcagctgttttttggaatcctggttttggtttcagggtaacaatattagcattattcctgttatatattgtaggagaaaataagtaagtaatgtcattaagaaccaaaattttccacacaaaaggaaaatgcaataaaaacccaaagcactagcttttttatttttatttttatttttgggcagggtcttgctctgccacctaggctggagtgcagtggtgtgatcatagctcactgcagcctccagcagtccttccacctcagcctcccaagtagctgggacaacagatgcaccaccatgtccagcaaatttttaaatttgggtttgtttttgtttttgtttttgttttaagacggagtctcgctttgtcacctaggctgaagtgcagtggcgtgatttcggctccttgcaagctccgcctcccaggttcatgccattctcctgcctcagcctccccaacagtagctgggactacaggcgcctgccacaacgcccggctaattttttgtatttttagtagagacggggtttcaccgtgttagccaggatggtctctatctcctgacctcgtgatccacccgccttggcctcccaaagtgctgggattacaggcgtgagccaccgtgcctggcctggtttttgttttttgagacagagtttcactcttgttgcgcaggctggagtgcaatggcacgatctcggctcaccacaacctttgcctcctgggttcaagtgattcttctgcctcagcctcctgagtggctgggattacaggcaagcatcaccatgcctggctaattttgtatttttagtagagatggagtttctccatgttggtcaggctggtctcaaactccaacctcaggtgatcctccagcctcagcctcccaaagtgctgggattacaggcgtgagccactgcacctggccaagacctgaagtactttaagtaaaacgcttaattctcattctgcattgggaacatggtaattgtgtaagacacactggggttgtatcagaaggacccacaggggccctgctggcacagatggggcaagcgagagtgaacaagaacaaggagcccctgagttagatgtgttaaaaatccaaggctggctggatgccgtggctcacacctgtaatcccagcacttcgggaggctgaggcaggtggatcatttgaggtcaggagttcaagaccagcctggccaatatggtgaaaccccgtctctactgaaaatataaaaattagctgggtgatagtgacgcacgcctgtaatcccagctactcgagaggctgaggcaggagaattgcttcagcctgggaggcggaaagttgcagtgagccaagatcgcgccactgcactccagtctgggcaacagagtaagactgtgtctcacaaaaagaaaaacccaagggtttaagctggctgtggttatacgcacctgccatcctagctgttccggaggccaaggccataggattgcctgagctcaggagttggagtctagcctgagcaatgtagcaggaccccccaagctgaaaaaaaaaaaaaaaaacccacagtttcttattggtgcttaaaggacaaggaagaagctcactggtcccctttggtaggagttagagagctagctacccatttaaaaatgggtagagggaaagcaacaggcatttttcctgcatcttctctgtgggctgcacactccaggaacgagagtgtgggcgagggcaaggttccctcgcatggcagtgctggcccgcagaactgcctagggtgacagggatgctctacaccgtctgccctgcgtgccgtttaacatagcatgactgaggacacggagtttaattttgtctatttaaatagccacatgtggctaatgggcagcacagctattgatgtgttttagcaaattaatatgaaatgacagaattttaagtttattgcagtcacctagtgaattgaggggttccagactgtaaggtccagacagtgattctccctagctgctagcccccaaggagagtgtcctgtgcttccacagggacacgcactcaccaagcctcaaggtctagttcatgagaaattgggggtatgtgcacttacgccacagggacgccatttgcaaaaccaacaatgggaaacagggcaagcatcctaactctttgagcatacgattgtgtcagtaaggggacctgtggattccagccagatatgactccaacaaagacggaagattgtgaaattatcaaaggtgggatcatagtgttgtggtcatgcttgttctgtagagataaatactgacccctttagcacaaatgcatgtttcataggatttgcttcgtggaagctagtgggagagagaaggagaaaggagcggcatgtggaggacacgagggtggtccccgatggccgtggacctgggtggtaagcacctgcagttaatcacaccattatctactctgtgggtggatttgaaattttccttaaagaaaagtgtgaaaattgggtttggcccaggtcttttctcagggagcttcgtgactggatcatctagaagaggggaaatggccatttataaaagctgaggtagaggccacttgggggtagtttaggagaccacttgggagtagtttaaattcaagcagaaaaccatgagcagagactggaattgccagaggggaccgtggcctgtcagcccaccagacagcctctcttacacactcttattttctgtaattacaacactcacagctactcttcgtggagccctcaggaagtgttagcaataaagtgggtgctgttcccattttacaggtgaggaagctgaggcccttgtgggtgaatcaggctttctggctttgactggacagctaagggcatgagcttctgggcctccttcctgtcgcctccctgctcagtacctggggcacatctgactaccactccagtaccctgactctatgatgaaaaccattctcccctccccattggtattgcccatccacagcagtcgtagcccatcacgagtggataaagtaggtggttagctggacttgcacatgacttgtttcgtgaacagtagtgcttagagttgtgatctagggacccagcgaacagtgtgtgagggacttcaaccctgcctctctccggtatgtgctgtgcctgctgtgccccccactccagtgttctccttggggctcctgaggcagctcccagtaggaggcctatcgttgttggcaccccaagggtgtccctgatccctaagtagaaacttaagcaggtatttggacaaataaatgagtgaaacaccttgtgacgttgaggcctgtggcacttccccaatagtgtgttagtgtaaaaccaccgtgtatgatgcctgttggtcccagcactttgggaggccaaggcatgtggatctcttgggcccaggaatttgagaccaccctaggcaacatggcgagacctcgtctctacaaaaagtacaaaaattagccaggtgtggtggtgcgtgcctttagtcccagctactcaggaagttgaggtgggaggattgcttgagccctggaggttgaggctgcagtgagtcatgattgtggctctgcactccagcctggacaacagagtgagacctcgtcccttaaaaaaaaaaaaaaaaaagccaccatggcagttttgttttatttggattttaggcagtgtagggcctgtgataaggcctggctgaggtggggctctgctggtagtaactcttgtgattccagccctctgaggccacttcctctttctgccttggctcctccttggtgaattctcccttatgtgtcccacattctcatactcccaggcattggatctttagctgggagatggttctgagttcccatgtgtacagtgggcttgctgcagcctcctgcagttgtcctgtaggactcgtggttggtggtgacatagaggctgcctaccctgatggctgatggctgatggcagtgtggttgtttggggtcttgttgtataaaaggagcatgtttactgaaggacccagttctgtgctgttggggtcacagcaaacctgcttttgcctgttagtattttagtagctctagaggggttcatggctattggaattagtatttttgtttttgttttcttttctcacctctttaaaaaagcatgtaaaattcacatggtagaatattcaccagttttaacgtttttaaagtgtgttgtttagtggcatttaacccattcacagtattgtgcaaccatcacctgtaattctagaacattttcatcacccccaccccaaaagaaaccttgtccccattagcagtcactgccttttccttgactctgctctccaccctcccagcagccacttattctactttctgtctctgggtttgcctcttctggcatttcatataaatgggatcatgcaatatgtggcctttttgtctgactttttttcacttagcatgatgttttcaaagttcagtcacattgtgtcagagtttcattcctttttatggccaaataatattccattgtctagatggaccacattttgtttatccattcatccattgatggacatttgggttgttttctgctttttggctattgtggataatgttgcttttaacattcacctgcacatttttttttgaatacctatattcagctctcttggatatacctacaagtggacttgcaggacactcgggagcatggtgatgccgtgggctggaggccctgcccaggctcatgtgggaactctgcgtttaactttttgaggaactggcagaccgttttccacatcactctactgttttactttccactgttttccacgtcactctaccgttttactttccaccgttttccatgtcactcttaccattttactttgcactatgcagtgtatgagggtcccaatttctctacatccttaccaatacttaattggcttttttgattgtagccatcctagtgggtgtgaagcggtttctcatggtggttttgatttgcatttccctcatgactaatgacactgagacagagtctttttcacatgctcattggtgattcgtctctcttctttggagaaatgtctgttcaagtcttttggctgttttttaattgggttgcttgtctttttgttgctgagttgtaaggatccttcatatgttctggacactagacccttatcaggtgtatgatttgctataattttttcccattctatgggtgtttttttttttattctataatgccctttgcacaaaagattttaattttgatgcagtccaaattatcttttttctttttttgatattgtgcttatatgtaagactgtttgccaaacaccaagtcatgacatttttctcctgtgttttttcttctaagagttttatggatttagctcctaatacttgggtctttcatccattttgagttaattttcatatatggggtgatgtaaagattttgttttgtttttatttttttgtagagacagtctcactatgttgcccaggccgatctcaaactcttggcctcaagcgatcctccctcctcggtcttccaaagtgttgggattacaggcgtgggccactgcatagtgcctggccaggttttgtttggttttgatcattatcttttctgtcaggatgaagacattttggcattaaccgggaaggaggttgaagggcagtggtagttgggagttctgaaagtactatttcaaatctgtttaacaaatgcgtatacattgcttcttctgtgcaaagcattgtgcctgcatgggcccttggatggtagtgctagagaaataggtgtcccttgatatcctgggggtggaagcccacaaacagagaggtgaataaatagcatgtcaagtggtgatgaggcaggaaaggggatagagaccccctggggggcatgtgtggaggggaagcgtttctcactttgcattatcagctgagacctgggggagtggagatgcaaaggccctgaggtgggagtgagccaggatgtcagtgtggctccagctgagagaacaggagaggggttggttggacttgggggacgggcacaggggtggctggattatggtcaggccagcaggaccttctggccagggctttgcttccgtattattaagtatcatgttttaccaaagaagcactgatacagaccccccactcccccacttcatggcacagctgagcttagctgttgcccagaggttggtgtgggtgtctatacacagactcctcccacccctgaggggaagagttccatttgcaaggtagagggtagaagtaggatttctgtcccagcccttacagctgtgcaggaacctgctgcaaggattgtttgtgggtagacccacgggctggggctgcgttgagagcagatagtttgtttcatcatagaagtaggtttccctgctggctgtgatcctccctgtggctctgtgatgctgcaggatgcttgtagggaggagcttgaggaagggcgcctgggcagggcctccagcccacagcgtcaccacgttgctgggtgccctgatgaaaatggcaacagatgaatttttggttccctcactttccacttgacatttccttccaggaactgagaaggcttttctggcccttggaattttctgtgccagacctccctgccgtttccagtctcaggccttgatggagctggtggtcagggccacagcttcgcctggctcagccctgagagactacagccctggaagggttaaggcctcccattttgtgatgtgacgcctgatgggcacgtagcagatggcatggaaatggcaggcgtaacccttcgtaggccacgtaggctcacggtccaggaggcatctgggaggggacagagagccaggcccttcccacagaaggggagcatggccagccctcacagtgacgtcctacagctgggactctggtccccatttacctgtggaggtttaagactgcccggactcccccttcacaggcggcacctttgtttctatgtcgtgtgttccttgggcagcgtctgtttctctctctggggccgcagggttgggcttgggcacaggccctggccaacagcggcgcaggtgtggggccacttcaagcacggcctcaaatgagggcagtgttgggcactgaacagttctgagatgtcacacacagaaaccaagtcctgatctccagtgtgagcacagggagctattggtagttgtgttgtgttgtgttgtgtttttgagacggagtctctctctgtctcccaggctggagtgcagtggcacaatctcggcccactgcaacctccgcctgccgggttcaagcaattctcctgcctcagctttctgggtacctgggattacaggcgcccaccaccatgctggctaatttttaaattttttttgtagagatggggtttcaccacgttggccaggctggtcttgaagtcctgatctcaaatgatccgcccgcctcagcctcctaaagtgcaccgcccctggcctagcagtagttttaaagacacttatttgctacctgtctttctcctcataataagcctgtgatcagtttaggtgtgctttttcctattgtctggtacaacttgggggtgaagacaggctttcatctcgtgttacccggaagggccctcaagctgagacacagggccgatatacagaagcagctaattgtgatccttgtggggctctttcatggccagtgtgtggacactatcgtcccctggttttgggagttttcaggcaatcatctgtgtctctggaagatggcataatccctacaccatcttccctgattaagaactatgcttctccagtttttttcccccagatgacaccagagagggagtttggggtctggggacctgtctgtcccaggctggccctgcacaatagcgtggtgagtctgagtggtgggcacaccatgggagggctgttggctattgggatcagtgatctattttctagagacaacttatgcccaaaacagctttgctctgcacagggtgctggagtgagaggctaccagagctgctctccactgtgcaggcctagtgtgagttacattaggaatttgcagaccatctagatgttatttatttttagagacagggtccaggcggtttcaaactcctgggctcaagcactcctcctgctttggcctccctagtagctggaactacatgcacacatgccacgagacctggaaggttttatttttaaaacgttgatggttacttgggtatatattaatatacctgggtatgtttctgtgatgttttgctctccaggtttactttgttaaatgtatcaaaaaaaaaaaaaaaaaatccagcctgggcaacatggttgaaactctgtctctacaaaaattagcccagtatggtggtgcccacctgtgacctcgggaggctaaggtgggaggattgcttcagcccaggaggtcgaagctacagtaagctgtagtcatgccactgcactccatcctgagcaagagagtgagatcctgtctaaaaaacttaataaattgattttaaaaaatattttggaggcatcatttacaagtcctctacctgaaacacatgagattgtaagtgcatttatttgtaaatgggaaagccagaggtgccttttctttttacttccttcattgttttatttatttatcttatattaaaaggtttttttgtagagtcagggtcttgctatgttgcccaggctggtcttgagctcttgtcctcaagagatcctcttgccttgaccttccaaagtgctgggattaacaggcatgagccactgcacctggtccctttcatttttaattacctgcatttctgagtagctctagaaccaagaactagagatgatgggatggatgtcctggtcgttggtcagattccgcccactgtttggtgatgggaaccagcttatattcgtgggtcattagcatttcagatgaagtgctggcaagggaccctgccattcagcagcacagtgctgggcacacctgggttgtcacatgtgccctgttaggaggcggtagatgcccctctccctctgtcagagctgagcatggcacttgtaaatagcgtcttcctggaagtgctgggtagggaacacctgtgggggctgttgctcaccccctcttcagggaacgctggtgctcatatttatgtatttggtggcctgaggggaggtactacttcacttgaattggatgtgtgctgctcatgtctttttggagtgtgttctgtgccttttgacagctttcagctttctcctcctcttcaggacctgttaaaggtttcagccctcctctcacaggctagggggcggtcaggatccccgtaccacaaggtgctggggggtatgtgggggctttttcttcatcgtgttcaggtgaatacaagtgtggcctctgtactgggatgctttctttcaccaagcaacctcattacattaaaaaaaaaaaaaaaaaaactctttttttttgtttgttttgtttgagacggagttttgctcttgtctcccaggctggagtacagtggcatgatctcggctcactacaacctccgcctcccggtttcaagcaattcccctgcctcagcctcccgagtagctgggattacaggcgcccgccactatgcccagctaattttttgtatttttagtagagacggggtttcaccatgttggccaggctggtcttgaacttctgaccatgtgatccgcctgcctcagcctcccaaaatgctgatattataggcgtgagccaccgcacccggccgagattcaaacttttaaaaagtggggtgggcgtggtggcttactcctgtaatcccagcaccttgtgagtctgaggcagccggatcatgagatcaggagattgagaccatcctggccaacacggtgaaaccccctctctagtaaaatacaaaaaaaaaaaaaattagccgtttgtggtggtgcgtgcctgtaatcccagctacttgggaggctgaggcaggggaatcacttgaacccaggaggcggatattgcagtgagccgagatcacgccactgcactccagctggatgacagccaggtgggctgtgaattagaaggggtgtcccaggcactgatcaggctcctcgtgctgcagaagtttccttctgagttcacgcattgtccagatgtgcagcagtcaacaaatcagttattgtggcttctctggaagctgacattaccatgtttttggcacgaagtagaaccaacacgcaaggttgcagtgccagtgagttgaggacgttctgtggctctatccagctaggtgagaaattgcagggctgaggaagtagtgtgggttgaagtgaagtaggcgggtgggaatgcgtgtgagactcagcagggctctgggctccttcacatgctctacaacttggtgattccggcccttgtgtctgaaaaccatactttgtggttttccatattcttgagacaagtagatcagtagctgtgtggacgctgattgctcttgagaactactgttcttttgttcagaattaaatgcagaagaaagactttttttcttcttacttttagagacagggtcttgcccctttgcccaggctgcagtgcagtggtgcgatcattgcagccttgaacccatggactcaagtgagcctccctccttggcctcccaaagtgctgggattataggcgtgagccactgctcctggccagaaagatgttttctgagacaattgagcaagactcagaagtaggaggaggggatgaaaactgtgcatgcgtatgagtgtgagtatatacgtgtgtgttgttcaggattgctctgtgtttaactagtgtatactttgcaggggaaggaggtgtctgtctgctgtcccactgtttcctttgtctgtcttctgcctttcctacagggtcagatgctcttacttcatgggcgccatgtgttccttgtccccttcccagtcttcttgttgcccttggcttccctggatcccacagcccaggtggggccaaggagtccctgctcaggcactgagagccttgctgtggctgtcagaggttgatggggagactgcccatcttgtgggaagcctttgtaacagtgacttggcaccttcaacaggacggaagaatgtgttagttccgtctcctgtttttgtaaaatggttgtccacctgttgaactgcatcagcctctcaaccaggcagaaggcttagagaatccatgtcagcccccaagtccagggagccccagtgtgagctggacaggacatagattgcccccaggcctgggggggtgaagtgacgtgcagaattgaaggaccaaggcagggagtggcagtaggcaggacaggtcctggtggttctgctgaatccctgggctggggctgggctgaggagctaaagccacaggcaaaatgtaccacacgcagacctttagccacccacagtaactttgttttcggaccttgattcattctgtgggacaggacatgatataggttacctgcctgtccagatcctgccccagagtgggacagtcgtgtatggcagagcattagctgggagaggtcacactagctgggtgtggaccttgtcctcctgtgcgtcccctcaaaaccaggtaatgtgtcctcaggatttccctggcacaaacgacctcgctctccctcagtcctcaaaggtgatggccagtcctggttacccgggaagcccgtgccctgtgactcccttcctgccactgggcatccctgtagcccccattcctccagcaatcagcctcagtggtgtgtttggttcacaccttgtgcttgcactgtgactgaaacctcccctcctcagcgaggcttctcctgggcccccaggctgggcttatgcccctcaggtccttctcagccctgtgcttttccttagggctttggtgtgattctcgggcacctgtgcttagggagtgcttgtttctgtaactgggttaaagtttcatccactgcagcaattgagtttatagcatgtaatttccttctaccagggacctatttatcttgagtgttctaagtgtgggcttttgggacagtataaaattgaccctgtagcaagctgtcttgtctgcacatagcactttttgaaactaaatttccttctgacttgtcaaaagagttaaccttgagtccttgctctggatttaatttacacgttcgagtctgtccgctgtgccccccacatacaaggtcttgctccgttgcccaggctggagtgtagtggcacaatcacagctcactgcagccttgacctcctggattcaagcagtccttccacctcagcttcctgcgtagctgagaccacaggcgtgtaccaccacaactggctattttttaatttttttaaaattttttttttttttgagacggagtcttgctccgtcgcccaggctggagcgcagtggagcaatctcagctcactgcaacctccacctcctgggttcaagcagttctcccgagtagctgggattacaggtgcccgccaccacacctggctaatttttgtatttttagtagagatggggtttcaccatcttggccaggctggtctcgagctcctggcctcgtgatccacccgtcttggcctcccaaagtgttgggattacaggcatgagccaccacacctggccaaattttttgtgtttttttttttttgtttattttttgtttttgttttgcttttgagacagagtttcgttcttgttgcccaggctggagtgcaatggcacaatcttggctcaccgcaacctctacttcctgggttcaagcagttctcctgcctcagcccctggagtagccgggagtataggtatgcgccaccacgcctggctaactttgtatttttagtagagacagggtttctccatgttggtcagctggtcttgaactcccgacctcaggtgatctgcccaccttggcctcccgaagtgctgggattacaggcatgagccaccacacccggcttaaaaaatttttatcagaaggccaggtgcagtggctcactgcctgtaatcccagcactttgggaggccgaggtgggtggatcacctgagctcaggagttcgagaccagcctgggcaacatggtgaaatcccatctgttccaaaaatacaaaaaattagctgggtgtgttggcacccacctgtggtcccagctactcaggaggctgaggtaggaagatcgcttgaacctgggaggcggaggttgcagtgagctgagatggagacattgcccccagcctgggtgacagagtgagaccctgtctcaaaaaaaaaaaaaaatttattggagacgaagtctccctttgttgcccaggctcatcttgaattcctaggctgtagtgatcctccctccttggcctcccaaagagttgggattacaggtgtgagccactgtgcccccccccacccccttaggtttctgtttttgaaacctacttttctctgtagtccattctgctataaggcttattttggaaaagcagatttgttccaacacaattgatgtgttagaggaccgtcgaggtgtaacacaaatgttgcgatggttgcgtgtggttttgttcaggagaaacactaggctagggattggaaaactatggcccacaaggtggtggcctgttttggtaaatagagtttaattcgcagacacgcccattcaggtatgtacagttgggcctccatatccttgtgttttgtgtctttgagttctaccaaccgtggattgaaaatatttggggtaagccaggcatggtggtatgtgcttgtaattctagctacttgggaggctgaggcaggaggatctcttgagcccaggagcttgagaccagcctgggcaatacagtgggaccccatctcttaaaaaaatttttttgggggctgggcacggtgactcacacctgtaatcctagcactttgggaagccgaggcaggtggattgcctgagttcaggagttcgagaccagcctgggcaacacagtgaaaccccgtctctactaaaatacaaaaagttagccaggcgtggtggcatgtgcctgtagtcccacttactcgggaggccgaggcaggagaattgcttgaaccccagaggcagaggttgcagtgagctgagattgtgccgcgccactccactccagcctgggtgacagagcaagactctgggtcttaaaaaaaaaattttttttgaaggaaaataatggaaaaaacaatacaacataaaataatacaaataaaactatagtataacagctgtttatgtagcatttacattttatggagtattataagtaatctagaggtgactcactaaagcatatggaaggatgtacgtaggttgtatgctaatactacaccattttatatctgggattgagcatctgggaattttggcatcccgggagttcctggaaataatcctccaagggtctggagggacagctgtcctgtcagaaccacagagctgagcattcctgacagagactaaatggcccgcagagccaaaattatttactgtgtagcattttaagaaaaagtttactggccaggcgtggtggcttacgcctgtaatcccagcactttgggaggctgaggcaggcggatcacgaggtcaggagatcgagaccatcctggctaacacgatgaaacaccatctctactaaaaatacaaaaacaaaattagccgggcatggtggtgggcgcctgtagtcccagctactcgggaggctgaggcaggagaatggagtgaacacgggaggcagagtttgcagtgagccgagatcgcgccactgcactccagcctgagcgacacagcgagactccatctcaaaaaaaaaaaaaaaaaagagagaaaaagtttgccaactcttgcattaggtgaatctagaaaactgttaccagtttaatatagtagagcacctgtgagtacatgaaataaaactgcccacacctcagacatgctccaagtcccctcggggtcccgcatgttatgggccacaccctatccctttccggggtcagacagcctccctccagcagaaatggcagcccacccatgctcacggcaagcagtaagttttccccgaggtgagggtcagacttgcaacatttgtatatttcttagccactgagcatgtgtgtagctgtgctgcccatatatccacatgtgtcattgcttgggctcctatcttacgtcatagatgaagttttggagtactgtgtccctaacccttatgtccataagccctgtgtttttatcacatgggtttgcatcccgcagtgtttttaggagtgctgcctctgttgcgctacagcagaacttaaccatactttgaaggcaaaggcaaacaccaaaaggtttgctctcattcgtgacagtaaagtcgtaatcacttaatatctcatctggacctcttggtgtgagagggcaaggtcaagcccaaattgtacaggtccagtgctccccatgtcctttggaatcttcaggtctgactctttgagtggttgatggggccttctgatggctgactgggtacttttgtgccttggtttccccacctgcaaaaaggcggctgatgagagtatttaccttacaggtggttgtggggtagatgctcaatcagtgttgggtgttttgcacttaaaaattagaagatccccatgcttctattaattacaaaggagcaacagatttggatgaaaccctgaggatcccagagctgaaagtgagtttgaagtgtccgatccagtccttcaactcagagcactcctatctgtgacacctctgcccacgcatccagtatgtgcagcacacctgctctgtgactgacactcttgcagaagtggggccacttcagggacatggacaaggtgttgtacctgctgtcacagagcctgttatctggtgagtgattgggacattctgagggctcataccttctggctgcaggttcttcccaggggcctcccagagcttcttccatagccccaggcagggcaagtctagattcagtcttgcctggagacatctgaggatggctgttccatcctcctcctcacatgtatgcagctctcctttgagccccacctgtgcctgtcacttcaggtgaaagcagtgtaaacatgattaacaaggccaggctcggtggctcacgcctgtaatcctagcactttgggaggccgaggcgggcggatcacgaggtcaggagatcgagaccatcctggctaacacggtgaaaccctgtctctactaaaaaatacaaaaaattagccgggcgtggtgatgggcgcctgtagtcccagctgctggggaggctgaggcaggagaatggtgtgaacccgggaggcggagcttgcagtgagccgagatcatgccactgcactccagcctgggcaacagactgagactgtgtctcaaaaaaaaaaaaaaagattaacaaaaggccccttgcacactgtggaaggcttatcagagtggccacctagacagaggcatggtagcctgagttcagacctagcctggactttcacccagccagacttcagttgtgcctgtaccttgtgggatgacacatgcccgtctccaactcatgcaggctctcagtgagaggtagttggctccagccagcttgcacctccccactgctggtcttatcctaggaccactgcagggagacgatctctcagtttggggtctttgaaggctcagggagctcctagccagctgactaggctggggtccatcctgataacatgagagagagaagatgtctgtatctctggtgtgtctttacttttcaggccaccaagggttaagaacccagcgtcagccagtgagtagtagacatctgttctccttttgagaaagcctgtagttcaggactcaccacggctttcccttccttggcctgaaaccctccctgctcagctgcttggcgcatgctgttcccctgcctggaacgtctcgcctaattccttttcctgccctggcctcagtctgggagacgccatctcagtccccatgtcttggagttttaaatgaaagcactttacttgtttgctcctctttgccctgtagggcaaccctgggaatcacatgcttcatgagtctaatttacagaaacgtaggcgtaactcagcagtgcataccaagcccatactgtttgctctacactgaaaatgaagatgaatggtgaaaaaaagtttctgccattgagagcttaacattgagttgcagtgagagatgaagctcctgagtggcacggagattgttgccagggctctggtgaggtacgctgtggcctggtggttgtggccactcagggaggcttgtggcctatatagaaggcgggctgtgggaatgagctggggggtttgggttgactgtttagaatttgagagtctctagcatatggcacagaaggtagatgatttaagctgcgtggacatcttcgataaacactggaagaatgggcagtggtatcctctctcggcccactgaagcttctgtgtccatcttgtgtccttagtcctatgcgttggagtattggaggagccagcttccccctctctccagagcttctcaccctagggagcctccttcctcctcgcctggatgaggtactgtctttctttgttagtttctttctttccttttttctttaagaaacatggcctcactatgttgcccagcctggactcatacacctgggctcaagtgatgctcctgccttggtctcctgagtagctgggactacaggcatgtgccactgtgcctggcttcacacttgtgcttttgattctcatccttagcaggtggggctgttgttttatctggttttcttttttaatccttgctttctttgaatacaggactgattcatagtcactgttaaagaattcaagcaatacagaaatgtttactatagtaagtgaaagtttcttaataatctactcttcagagattactaccactgattttggtccagttcctttcagttttgattttagtgaagttactttcagttttttccctatatacaccttttttttttttttaaaccatgtaaatggtactatgctattctgcaacttttctcccacagttctttccatttttcttcacatagcattgtctgtgaagtagggatgggaaaactgaggctcagctcaagcatcacttgagcccaggtgttttgagtccagcctgggcaacatagtgagaccttgttcttaaagaaaaaagtttgggttgactgtttagaatttgagagtctctatctagcatgtggcacagagggtagataatttaagctgcatggacatctttgataaacactgtggaagaaggggcagtggcatcctctcttggcccactgaagcttctgtgtccatcttgtgtccttggtcctgtggttgattgacagacctctcccctggcccatggccagccagcgtgtgtgtgatggagctgagaccaagtctctgttccctgctgtgtctagttgtaggagctgactgcttggaacacctttctgtctctcaagttaagttgtatctctcgtacttggccttaatgaagtttgacattgagaagtccagagctgctgtttccggtgtggcttccttccggaatgagtcctagtcactgttactcagagatgtgcgtcaggaagtggctcgggccacagttctgagcagatggaggtgtctgttctgcatgggaaagaagtatgcttgtcaggcaggctctgccaatgccaaaacttggcccacctattctctccttaccccctcaacaggtccttctgggccacaacaaggtaccctggtttgactcttaggaagtgggagagccactgaagggggtacagatccaggatgtggctttgggagcttcctcgggctatgctgccgggaggagagtagacaggggttctgggtccagaggcccatctgtgctgtgcatcaatctgtgtgaagggcagggccacaggggcgctctggaggtgggcacctgggcgcaggcttgctgcagctgtgtgcctacagggtccttgtgtcttgagtgttgggcgcagctcacagctagcgaggctagcacctggaccccgttgtcatcatctgactcagcactggttgcttcatgggcccttcttccttcctgataggaagaggtgccctgaggtgccctgtgcctcctgaggacagtggctgcccccaggttcagggctctgctcctcagcatctccgtggggctcatcgtgggcctcgcactcagcacatccgaactgtagcccaaccttccttcctcaaatctgctcctccccatctcagaaaagccagccccactggtccagttgctcaggcaaaaacaagtgaaagaaagcaaccccctccggagtgccccaactcccctctgctctgtccccttccccagtgtagctgcaccataggaaccgctcccctgccctgcagtcctccagccaggtgatcctttagagcaagccagattcctcccctccggcctgggccagtgcttcccccagcacatgtctccgctcaggccctgtctccttcagggctggcttccggtgccgcccgttccacccagcccccgtccctctgtgtgctctgactgccccgtgctctgcctcgtgtccccacagcaccgtcaccaacaccctctgtcatttcgctcgttttccagcatgggggtggatggtgttccctctgtcttgttcaccactgagtccccagcccacagtggaggctcggtgagctgctgtcgggtgaggaggcagaaagacgcctaaaatccaccgttaagagcatcagccctgctgctcccgccagtgctttaacccacttactgcgaagcctcactttcttcctgtctgaaataagggtgttactatgggtatgttagtgatgggtgccacagatggcattttatggtagagttagtattagcattgtgatctcaggggtttggttttatgatttgtgtcatgtacttaatttctcttttaattatcaagagatgcgtactggcctggtgtgccagaagtgtgctgggtgccttctgtttgtcccccaagtcctctttaagagttctggttcctgccacagcatcagtcagccttttggaattgttctagaacatgttttctgcctgaggctctcaggccagttggatggtggcattttacgaaaataaagcagcattcctatctgccctaaagcccatggaggtgctcccggtcagagctgcgctgtacctgtgtggggtctctagtgtggctggaacctgtcctttttggcccctagttgaggaagagctgggctacgcccccaccacctgccagcccagtgtgtgcgggacgtatcagaggagaccgatgcccactcagccttgctggtgctgctcatctgtgctggcttgcagtccggcctggggtgtttggagagagtgaggaggagggtgaggctgaccttcaaccttgtgtctcaggcagccctggcagcctcagtgctctcctctttcaaatgggcacactgctgttgggatctgtctgtgcaggcagcagccggcagaggatctcagcccccaggacggggctactctccatgcactggcagctcccgcacaacccttgcctggaacttccgccaccggagctgccttcccctcactctcccctgtcactgggaattttgaaatgaatcctcatttgccagtcagggtgacctagcctcttcacctacttttaggaagtgttctaatgtaccccccactgctctttgcaggagtcatctgtcgcgctttcttcttcctgacaactttgctcctgggtctgtgcttgctgtgcggtggccgccagccctgttgtgctgggggcactagtcccgcttgcttcgaggagggaggagccactccttactggcacctgccctccccaggagcaagtgtcctgtggtggccgaggattggccagtagcaggccctgcgtcattggtcttggcagtggaggaggctcctgccaaaggagccccctgcactcgggggctggccccaccccctccagctgtgcctgtccttcctgaggtgggggaggggtgccgcagggccccgccccgcagtggcctgcctctgggaggcacaggcatagggcaggcgggcgctgtgaggccagccgtcagtgccgggcctgggattggcagagttccaggccttaggcttcatagtgagctgctgtgcaccttgagtacacgccagccagccctctgctgaggaccctgacctgctaccacaacagggggcccaacaagagaggtctctggggctggagggagcagctctgctgggcacctgaggccctgctccatcctgcatctctcagaacctctgggtagcctctggtcctataccagtgagaacgaagtgaggccacacaggcacggcccccctgatctggctgtcagttccaccttgtccatgtgggctggagcagcttcgagaactcattcagggtcttgggttcaaatgggcttcatggaactgagcccagagcttacagggtgggaggctgtgctgggaggggccctgcctggctggaacaggggcagagtggggagcatgggggtttctttgagtcacagggaagggtgctatgtcctggaggtggaggtgcattctccctgtccacctggggacctcatccccaacagtagttataaggccagactgggaagcttcatccgtagagtggggcccttacttgtccgaggtcctggcctcccctcatctctcacctaaacaggcttttccctgccctgggcctgggagtgcacatacctgctgtctaaggcagtgcttgaaggagaaatgtcccacccctcccacagtgagggaaatgagaggaggggacccacactctgagggcagtgacttatctgtggtctcatgggaggcaagacagacaacctgttagtgagcagttcagatggggtttatgggcaaggcatgtcggaggaaggaaggacagagaccatagaacttcagggctgagagggacaccgtagcattcctcacctcccccagagaagtgaggccatgacctccacattcgacctctacctgggctccattccacggaggagctgaggggcagctgagcaggagcgggggcgggggtggacagggtggccgggggcagcggaggccgcacagttggtgtgggataggtggtaggtgcaggctgggatgccagaggggctggggacaggtggaggcaagtctgaaaacctgtgcccttgagattcggagtctccctgcctcagcctggtcatgttaagggtcagccatggcacctgggtggtggtgagacagggtagggagcacagagctgctctgggcctgtgtgaagcaccagggatttcctggccttgaggagaccccagtgtttcaagccggtgcccgggtgccctggctggaccacactggcacaacacgcatgtagacggcctgctttccctctggctccaggagcgtgaagcagctgtctctttctttcctttcagtttgagtgcatgagggggcacatttgggcagggccttgcgctattgctcatttgtgaaattggctcctttaaggaagctgcagatgagtcagctctggagtgcgtcccatggatggcgacaggacccctgtgttgccttgtgctgcccccagcttccagacggtctgcctggctctacctgggacaggcttccccagggtgtttgccagtgaggaaactaaggctctggcaagatgagtgccctgcctgtgaggacacagataggaccagagggcttcagcatagagcatgccacaggtgtgaattggggttctctgtggggcccaagtgggcaccaactgtcccatggaaaactgtgacacttcgggaattccactagagctcagctgctaaatttctcttttgtcctctggtaaacactgggatgcttttttaagaacctgactctctctgtctcaattcctgtgccctgtcctgttgggacgtcgaggccgggattagagcagcccctttaagagtgccagtgtcccagaccctgctgtggaatgccagccgcctccctgcagacagacatcgctgtgctgtcgtcctgtctccgtgagggttaacaacacttcagcctgttgtctggaaccggttcagactggttttctggaaagtgctttgtctctccgactgaatcctgggaagggtcatgtggagccagtgatgtcatgggatcaaaaactgactcagctgtttttttcttctttttctttcttctttaaatcaagatatgtgtgtgctgcaggtacagggcagtggcacgttgatgggccaggcctcactctactcaaagtgtacctcactggcaaccaaagggttaaatgtgatccccagtccccactccccagaggtgagcagggagtgaggagacctcccttccctgaaggggagaagctggggttaactcgagtcaccacagcatagggctagtcccaggccccgaccctgctcctggaacagtgcagtcaccgccctcctggattccagacattgcaggtgctgaaaatcccaaaggcaggtagttgagatctagaacaacttttcctctgtttgctgttgagcctttccttgctgataagcagccaccttccactgctcctgttcagcaccctgctgcctctggcccccaacagggcagggtgtagtttggctccaccaatgttcagccacacagtggaggctggggacacccccctcctgcctagccttcctcaaggcagtgatgaaatgtcctggggatgcttttctgggccctgcgtttgttgtacattcttttgccatccttcccatagggaggaaaacactgaaagcaacactgaaaagtctccaagaaggtggcaccttcattgcacccagttaaaatgttgtgtcttctcctccctcccaagttcagaatgaccgaagaagcatgccgaacacggagtcagaaacgagcgcttgaacgggacccaacagaggacgatgtggagagcaagaaaataaaaatggagagaggattgttggcttcagatttaaacactgacggagacatgagggtgacacctgagccgggagcaggtccaacccaaggattgctgagggcaacagaggccacggccatggccatgggcagaggcgaagggctggtgggcgatgggcccgtggacatgcgcacctcacacaggtgagtgggaggagccagcgggaggggctggaacctggagacaagcccagtgtgcccaggttggggctggccacactccaggcctgttggtaacagcttggcggggttgtggagagggctgtaggctcagctcgggcatcacccaccactggcagctgtgctgttgtggccattccagggccccaggtcccaactgcaagtggcacagagtgtgggtctcacaggagaaggagtggcacattccatcagctcccctgccatcagtaggcctttgccacccacgcacctgctgtctgtccaactcggtgcttttggtttgtagggacacttgagttattcatttggttatgcttccctgcttttcagatctagaggtcagagggccaggaatgctacacctaccttggtcacttggctagggatagagttgggagcccagcccagggcaccctcctcggagcgggtacgggatgctcactcgactccatgttcacttggtgctggtctttggcttgctctgttggtttgtccttagtcaacactgattacttcaagagtgactttcctcatattcaccttttatgagtctcttaaggtaaaagcttgaaataaaaataagacccaatctaccacctatttcttgacttcaaaaccttcctttctctctgtaaagacaaattcagacccagcacctgctcttgcatcacccctccccttggagctctccagaatgttcatgcccagacacccactgagggctgtggtgtggccacagcttcccggctggccctctgacaaactcctctgtggcccgttgctctctctcctcaccgcccactggagtcttctccctgtggagggcctgtctctccacgcctgttcataagggacagctggtggctcctcaccttcccgtgtcagctaaccccacaggatgaccccagcctgcagtcttatgtcaaattcgtttttggaacccaaactgttgggatcctgaggacttcagagatcatctggtgttcacagcgtttaaaatgggaagataaatgggaaaacccaagcctgctcctgttgacaaagcctcctagtctgaggaaatatactttgtagtcctgctgtccaaagagggcttttctgtctgactctgctgtctgcagtccccattctaaaaccaaggtcctcttctaaagttccagaaataaaactataggtccaagtctccttttcctttctctatgttttcagccagagaccagtccatgacagctcagcaggggtgagcagtgaggggctggtgtggagtcagggcaggaagaggaggagtccatgttcatgggaatctgcagtccatgtgcatggggtcccttgtgcattcctgggttgctgacatgcattttctcctgtaatcaccatgttcccctgcagggtaggtcagtggattgtgagggagaagttaagtgttaaagaaactcagagttcagctgggcgcggtgactcacgcctgtaatcccagcactttagggggccgaggcgggtggatcacaaggtcaggagattgagaccatcctggctaacacggtgaaaccccatctctactaaaaatacaaaaaaattagctgggtgtggtggcgggtgcctgtagtcccagtgacttgggaggctgaggcaggagaatggtgtgaacctgggaggcggagcttgcaatgagccgagatcgcgccactgtacttcagcctggggaaagagtgagactctgtctcaaaaaacaaaaaaatattgctagcacctctgaagccccctcatgcttgcttgctgccactgtcttccaagggtaatcactttcttgacaatatggattagtttttcctgctttggtactttaaataagtgggattatatactatgtaccttttatcttcctgctttcactcagcattgtgagatttacccatattgttgtgcataccagtagttaatccattttcattgctgtatagtattttgtttatagagtttctatttgggtatttttcaaaactacctttttttctttcatgctaacttattaccatcttatgaccgaatctgggcatattgaaagctagaggcagtttctgatggcttctaggagagagaatttcctttttctttagtggctggtgaattggaatcatcaagaaatatatatgtttgcatgtgtgtgtatagtgtacatattgctatgttggatgatttggagcatgcagaggcagatacagtagtagaatcagctttctgcctccatcttttactccgctccctgtcgctctttaactcagcagtttttctctctcagtctcccaacttgtgtgagtgttttatattctacataaattgagggtggagggcaacttctggttgtgttgaatgaggagattggcagaattgacaaaagcaaaatgaaacaatctcagcattctggaaaaattgagcaggggcatacaacaatctgagaagtatttatgcctgtaactgctgaatttcaggtgagaacagtgagactgtatggcatttggcctggagctattcctatgccctctcccatctgtttggtaaagaggttctgtccagccactgtcagctttgaggaccaacagcttcgctgtgtgggtgaaaaggaggactgttcattttagagtggtagcaaccctgcctgtggtcttgtagatgagagtgacagtcttggagatgggcaagtggggagacacagcggctctgttttagcccaaggttggggcaagatagaaaaactatttgaagaaataatgggcaaaaacatacttgaggagaaactcatccaggaatcccaacaaaccctaaatagcataagtacaaagagatcttgacctagatacatcatagtcaaactgtagaaagccaaagaaaagaagaaaatcttgaaagtagcaaaagaaaaacaactcagcacatctggggagcattaataagatgaacagctgacttctgactcgagacaatggaaacaaaaaggagttgaatgatgttaaaagtatccaaagaagaaaactgccaacccagaattctataccagtaaaaacagtccttcaaaaatgaaagcaaaaaagacattgtcaggtaaacaagactgaaggaatccattgctggtagacctgccagttcttcagcctgaaaataaatgacacgttggcagcttgagtctatgagaagaaataaagaacactggaaatggtaaatgcatgggttaactggaaagacttaactagttctgcagtctggaagccaaccaaaggctttgaatgatttgttgggtttataatatccacagataaaatatatgtcatattagtacaaaagatggggaattaaatggagcaatattggagcaaaatttctgtatcttactggaatcaagttagcatcagtcttatatagattgtgattaagatgcttactgtaatgcctagagcagctctgaacaaaataactttaaaatatagttttttaaaaaaatcagggctgggcacagtggctgactcctgtaattccagcactttgggaggctgaggcaggtggatcacaaggtcaggagaccaagaccatcctggctaacgcagtgaaaccccgtctctactaaaaatacaaaaaaattagcctggcatggtggtgggcacctgtagtcccagctacttgggaggctgaggcaggaaaatggtgtgaacctgggaggcggagcttgcagtgagccaagatcgcgccactgcactccaacctggatgaaagaacgagactccatctcaaaaaaaaagaaaaaaagatcatcagaattaaagttatacactaaaaaatatttaacacgaaagaaggcagtttctttattcactgagaaataaaggaacaaacaagaggacatgtagaaaacaaaatggcaaatgtcaatccagccatgtcaataatgcagtaactgtgaaggatctaaatacctcaatcaaaaggcaaggactatcagatagtgtaaagaagcaagattcaggctgggcgcagtggctcacgcctgtaatgccagcactttgggaggccaaagtgggcggatcacaaggtcaggagtttgatagcagcccctggccaatatggtgaaaccccgtctctactaaaaatacaaaaattagccaggcgtggtggcacgcacctatagtcccagctacttgggaggctgaggcaggagaatcacttgaatccgtgaagcggaggttgcagtaagctgagatggtgccactgcactccagcctgggtgacagagctccgtctgtctcagaaaaaaaaaaaaagaagcaagattcagcttaattatatgttgtttataagtgacgccccttagattcaaggaataatacaaaaggatggaaaaagaggtaccataagtaaccgcttgagagctggagtaactgtattaataagagataaaagacactttaagaccaaaaaattactagagccaaactgcgactttatttttttttttgtttttttttttttgagacagagtctcactctgtcacccaggctggagtgcagtggcacgatctccacctcgtgggtttcagtgattctcctgcctcagcctcttgagtagctgagactacaggtgcccgccaccacgcccagctaattttttgtatttttagtagaggcagggtttcaccatgttggccaggctgatcttgaactcctgacctcgtgatccgcccgcctcaccctcccaaattgctgggattacaggcgtgagccactgtgcccagctgcgacatttcatatgatatttcaggaagacataacagtcagcagagcccccaaatacctgaaaacataaacttgataggattgatggaaattaatcagttatagttagagatttcaatatcccactctcaataattggtagaacatctagacaaaattggcaaggtatggaggacttgaagaacattattaactcacttagcctgacatctgtagaatacctggtgaatgcagaatacatcctcccaattgtaggtgaacgttctctgttgatcatacattggaccataaaacaaggctccagtatagctgtaaaaaacaaaaaaaaaaggaagtaacaagtgttgaggaggaagtgtagaaactggaattcctcatacattgctggtaggaatgtaaaatagcccagatagtttcttacagagttagttgtaaacttaccgtatgacttagcaatttatccaagagaaatgaaaatgtgtccacacagacaggtacacctgcagcagcatgattcatactggtcgaaaagtagaagcagggccaggcacagtggctcacgcctgtaatcccagcacattgggaggccgaggcaggcggatcacctgaggtcaagagtttgagaccagcctggccaacatggtgaaaccccgtctccactaaaaatacagaaatttgcctggtgtggtggcgtgcacctgtagtcccagctacgtgggaggctgaggagggagaattgtttgaacctgggaggcagaggttacagtgagccgagatcgtgccgctgtactccagcctggtgacagaacaagactgtctcaaaaaaaaaaaaaaaaaaagtggaagcaacccagtgtcccatggataaaacaaacctgctacctctatataccagattactgttcagctttataaactactcatgtgtgccataacatggctgaatctcagacttgccacgctaaggaggatacagcagatgcagggactacttgttgtatagtttcacttacagggcatgtccccccaaaaagcaaatttatttgagagatggaaagtgaccagtggttgactaggacagggctgggggtgggtgggagcagtgattaacaacacatgggcacgttttgggaagatggaaatattttaaaattgtatcgtggtgatgattgcacaaatttactgaaatcattgaatggtactcttacggtggctgaattttgcggtatgtaaagtatacctcaatatggatgttaaaaataaataattaaatgaaggttaaaatagtttggtttctgttgtggcatccataaatgtgcacacagaaaaacaaaacccgcagaggtagaagttgtgagtctgttggttttgtgaggccaatccaaaggtcgtgggcatgtgctgcccctatgccgagtctggactgtcagatgaggctggagctggcaggcagaggaggctgcttttggttctctgttttttggagttggtcttgcactgtcggccaggcaagagtgcagtggtgcagtcgtagctcactgcagccttgaacacctcggctcaagccactcaagtaggtgggaccatagatgcatgctactacacctggatggggtttttctgttgttctttttaaaaaattttttgtagagatggggtttattatgttccccagactggtcctgaactcctgatctcaagtgatcctcctgcctcagcctcccaaagtgctgggattatagatgagccacggcaccaggccggttctttctgttttgtttttgtgataagtagcagatccagtcctgcactttcctgtaggggagagtctctttctttcaaatggttgatcttcagaaataactggccacacccagatggaaatagcttgatttgttttcttttcttttttttttttgagatggagtttcgttcttgttgcccagactggagtgtggtggcgtggtctcagctcactgcaacctctgcctctcaggttcaagtgtttctcctgcctcagcctcctgagtagctgggattacaggtacttgccaccacgcccagctaatttttgtatttttagtagagacagggtttcaccatgtaggccaggctggtcttgaactcctgacctcaggtaatccacccacctcaacctccgaaagtgctgggattacaagtgtgagccactgtacccagccttgatttgtttttttttttggatggaagagcacgttgctcagtaaaaatgcggctcttctccaggggtcctgcaactgaaaggtaaggactgagggtccctcagtcaccttgggcctgcatggggtgagggaatgagaactctgtgaatggccacacctcactgaggatgtgtttgtatgtgccttttctgaagtgtcaactcttattggattgtcagtggtccaggaccagacctgctgtatgccaggtactatgctgatctctggtagagaggtaatcaagacaggatctgatttatgcagctatttttttggaagaccatgtcatgaaggaaagcgcagaggtcttggaaagaaggacttgccattgccgatgtggctcaccgtctccatttccttacttcacctgggaggagactgggctgtggcttccgtggtccatggattgggcagacttcaacacagcctaggtggatatctggcaagttgtccccgttagtggtgtgtggcgttcaggcagctcttgtgtcttgctcttctcttccccacctccccttgtaccatgagtggcttgtctgctgtgggagggggcagcacttggaccaaaggcctgccccatggtctggacggggcaggctgggatgtgtgttccttggccactttggggctcaaagtagcatctgtgctgttagatctgatcttggctttagttttttttggccttcagctccctggtcaagcacttgtggccagtgacagactgtaaaacacactggaaatgtagtctgtttactgggcctgcaaaaccagtcgcaattggtgacactggtgtccttgatgacaattagaatcattgccgttgtctttctttttagacttttgcagtcaccaagagggcggtggggtgacacatctgtgtcacttccctgcccagagaatgcactggctgatcatttgatattaagacaggttaggccacccaccacggtgagcatgcgtgcccatcattaaaatgcaggttaggccaggcgcggtggctcacgcctgtaatcccagcactttgggaggccgaggcgggcagatcacgaggtcaggagatcgagaccatcctggctaacatggtgaaaccccgtctctacttaaaaaaaaaaaaaaaaaaaaaattagccgggcgtagtggtgggcacctgtagtcccagcaacttgggtggctgaggcaggagaatggcgtgaactcgggaggtcaggcttgcagtgagcccagatcacaccactgcactccagcctgggcgacagagcgagactccgtctcaaaaaaacaaaaacaacacatattaacacccaagccttccaaaaccaaaaacaaatcagaaagtaatgtgatattgcttcttcctagacatccagccacccagttgtccagaacgtgggagtgtggacggctttgttttgttctgtgccaaaatggggccagctggaaaaaaggtgtgcatcacataatttttgcaagatgtctctgaggatcacggatagagtgagtccttcctgtttggacagatgctttttacagggaagggagaggagggtgaggtcgacactggaattgcccccaaccccgacaaccacgtgagcatggggctctcctggtgtgcccgagacagtgagttctgactcacgtgtgcacctgtgagtcaaaccctgaatttaggtcacaaactttatcacggcccagaaaccttaccatcccactccagaagggccctcacgcactcccagcccttcctgttttggtgcttcccctcatgagactggtcttgcctcttttccggttttccagggatgcactcacagagtcagtgctctttggggtccggcttccttctgagtgttttgggatttgcccctggtgtgtattggtgtgcctctgagtggtgtgcacagggcacttctcacttgtcagtagacatgtgtgcagcctccaatttgggcctggtgtgagcacccgctgctgtgcaaggtccctgcagattgtctgtttgtgggtacgagtcagcatttctcttggtaaacactcaggttaaactgcagggttacaaattgtgtgtgtggttagtcgttttagagaaacgactgggcttttcccccaaaatggtctgtgcttttcacactcacaggtgtggcagtccagcataccgtcttcacttgttgttctcagtctttatagttttagccactgggtccccagagaggttgaggtccagacttggcctacacgtgtggctctgtcttaagcccgtcacccttgtccctctttgatggaagcacgaggccaggcagaagagcccactgccccttgtgctagtcagtcacatagcggatgctcggacagttgctggtgccacagaacccctatcatcgttgtgttggctgcctgcatacgggtggaggggttgtcttcacagcgatgtgcagagctgagcttccaccccctgctctcaggactatgcctccccgcagctgctcccggcccgccggccggctgtctacaggaatgcacgtccttgaatgagatggacgatggactaatgtggcacagctgtcgacgtgagggctcaggaaagggctgggttctcatagcccagggacatggtttgtggccctcacactggctgcctcctacagccctcttggcagggattgaacccctaaatcccccatcggggtgccagagctttggaagtcccacagcaagaagccattttccctttgtgtgaccactggcctgtcccagagtcagggtccagacagggggctccggagcggggtactctgtgggcggctctctggagcccccccccctccactgccccagcccctccccagcacctgttgagggctggctgctgcctttcacttgctaattctctgtctgcttctgggcaacttccaggagaggctgggtggccccagggagtgccttcaccagctccgactagaaatccacagcctgcgggcatttcttagctcatgggaactgagaggtatgttcccttgggaatctgttttgtgctcccttccctgccttagccgctgcccctccaaacctcagtggccaccgtctgtctcctccttgttctctatgtcacccctttcctgcaggctcctcatccaatttccctttatctgggactctaatcccagaaatcgctgaaatgtgaggggtccacctgtacttctaagaatcgttagattatataggggcaccaggataacagactgccctgtttctaactccccaagtcctcagctcacatgagggccgtagcatgagccggcccggtgccaggtaaaagagcatcactgctggtcttcctgaacttcagcttctccaaggtgttgccagctccctgttgcctttagacgccctcctctggtcatggaggggactcggatccctaactttgaaatggggcttctctcttggacagtgcaggctctctggggatgttattatcctgtggtggctctgacagaaaaccagaggccacactttatatggacatcgaggtaatcaccagtaaatgtttggccttctctgtctgaactcttctcacacatctgtaagttgagcagatttgcagattaagcagacctcttccttctttttaaatgacttgctttctgttttgctgctgcggcttctgatatctcctcccagcatgtattcctgctgttgtcttatttgtcactcactgacaggcttctcttcctgtaactgatgtcccagctcctgtagcgggttatttaaatgtcccatccacagggacaagacggggagggtgtctgaccagcactccgctgtgcccactgaaactgggtttagctatgttgcttttcagtctgcagccagcttccctgccatgctgcaagcagttgcagtgaaaccaacctggaggctacggggcggcttctgagtgctccttaggccgagagccagtcctgtccctcatggtcccctaacctggtgaaggagtggagcgaagggcagtgggcgccaggccttgggggtctctgtgtgcagaacaggtagaaacagacggagtggatacctgggaacctgcaggggcatgtgtgatcccaggtgggacaggcaggcgtcacacccaggggggcagtgttttcccggttagcagaatatgcccctggaagaaaagaaaagcctacctggttagaagagatctttctgaggtttttcttctctctcttaagatgagcatatgaattataatttgtgagcctgagggggcagctggtggtagaaaaaagaacgtgggtgtctgacagcctggatcggccatgtactgaatctctgtgtggcctgggatagtctgcccccactttgtgaatgcctcttgtctcctctgtgaattgaggctccaccatagtgtaaagtcacagtgctgagaggaaggcagggtaacgcctgaagccaagctggatctgctgcctttggaaacactgagttacctgtggctgaggctcgggcagatgccaccgttctctctggagggtgggagacaagggaggggacgtctgatgggtggaaagatgggagacataccagatgttgctatgtgcctcccttgcttgggacctgtgccataggactgcggatttttagagcttatatctttaaaatagttgtgacgtcatcaaattgaaaagctttgggggttcatgcgactgagacttgatgccatgcagaattcctcaaggcagggccctgatagctttcgtacaaagagcattctaaagagagccatcagtccaggcctccaggagacttggcgtgtctgcaggcggtgtgggaagagtggtctgagggcactctctgggggactgcagcccagaaatcatggtgcaccgggtgcaggggtcagagtctgaaggtacacggtggtaggagcagagaccggaaaggtggtctgggatagattgttggatgcaggaagggtggaacatagagttgggactgggccttgggtttgggacccccctctggagaagggagagttgatgctctgagcctaggtggagcccaggatctctcaggcatttggacgggagagaggtggccaacttgctggagaaggaaggagattcctagtcccggagaccagcagtctaggggcagtggggcacaagattcagaatagcgtcctcacactgaggtcctgggtgacctggccagccatgttcctgtgtttgatccacagccatagggcgtcgcccgctttctgtgacttaggtaaacatagaggctgtacagttgccacataaggctgtaagaaccttaaggtgaccaaattttgttggctgatgattaaataggttttataagcaattatagtgtatctttggggtgaatcctattaaatttttagtacctctcacttttcaaaatacaactttggcagcaaaaagaaagttacatgggccatgatacatcagcaggacaggacccaggatcccagcctctgtactactgtcgaggctgccagagatgggaaatccttttcctgaagcactggcacctccccttttccatctgtgggccccagacagcagttggatttgtgggatatgtctgttgacatttactgtgttagaaaatttgaaaatactggccaggcgcagtggcttacgcctgtaatcccagcactttgggaggccgaggtgggcagatcacatgaggccaggagttcgagaccagcctgagcaacatggcaaatccccgttgctacaaaaaaagtagctgggtgtggtggcgcacttctgtaagcccagctacttgggaatctgaggcacaagcaccacttgaacccaggagacagaggttgcagtgagccgagatcgcaccactgcactccagcctcggcgacagagtgagactctgtctcaaaaaaaaaagaaaaaaaatttcagcctgggcaacatagcaaaagtgtctctactaaaaatccaaaaaaattgcagagtggtggcgcacacttgtagtcccagctattcgggaagctaaggtaggagaatcacctgggcctgggaggcagaggctgcagtcagttgagatggcaccactgtactccaggctggacaacctgagttgagaccttgtctcaaaaaaaaaaaacaaaaaaaaacctattattaattcatttaaagatgactatagtagacctgtgacatattagcataaataacttattattaaaaatctattttgcaaatctctttaatactcagcttactaagaaggcagctgctaggttcccgtggctatttctgtgtccatcctcttgcgttctttgtgagggtttgaagcatggtgaagaaaatgtaactagcatggagaagaggttggagagtggaggagcgtttccataggctttttggatcattgtgcgtttcctcctctaatgagaaaccaaaatccagagtggctagtctctactggtgagttggcccttagactctgaaacctcatcattgagctttttgtacatgggttacattaaaatccgtgggactcttttacactttgaacagaaaaatctgtttttaaaactaacttttaattttagaatagtcttagactcacagaaaagttgcaaagatcagtcctgcaaacctcatcccagtctccacattgttaacagactacagaacatgtgtcacaagtagtgagccagggtccatgtattattttaaccgagttcatactttattctgatttcctcagttttttccagctgtcctttttcccttacgttatatttaatccttgcgtctccctagattccttggactatgacagtttctcgtactttctttgttttgggttaccttgtcagttttgaggagcagaggtcaagtgttctgtagaatgtcagtgcattgggatttgtcagatgcttttctcacaggcaggtgatggatttgggggaggaagaccacagagggtgaagtgctcttctcgtcacatcatatcaaaggtactgctggtcttgaatgaacgatcgttttggtgaggtgccatttgtcaggtttttctactgtaaagttacccttccctccttcccctgctccaccatttccatactgtcctctttggaaggaagttactatgtgtggcccactcttttttttttttttttttttttttgagatggagtctcactgcgttacctaggctggagtgcaatggcatgatctcggctcactgcaacctctgcctcccaggttctagtgattctcctgccttagccttgtgagtagctgggattacaggcactttagagaaggggttgttcaccaagttggctaggctggtctcaaacttctggcctcctgtgatccacccgcctcggctcccaaagtgctaggattccaggtgtgagccaccgtgcctggcgacacagcctactcttgaggaatggggactcatgctcacctcttcaaaggtgaattgtctgcataaattatttgggattcttctgcctgacagttttatcttttcttcccctgaatgacattttactcacgtatgagtttgtaataccattgaatgttggaaaatagtagtttactgggttatagagacgtttcagatacacatatcatcatttagtgtcacaaaatcagatttgtcaatgtcaccacctatccgttgggaagttgttgagctcacagcaagtagcaaatataagttttccaaaattctgatttttgattaatggaagctcgtactttatcactggtaccagatacccttgggtgtttttcatgaagcaccaggctttgcatgaatgctcacgcgagcgtttctcttcatggcgccattccactgcagtatgcagcaggagggcttcttcctgtcgtactttgtcatgggataccacagagacactactcagaggttgacgtttaatcgcatttcatgactgccccccgaggtgagtggcgtccccttctgcagatgaagaaacttggcctcattgaggtttggtgaatgggccagtcgccccaacacctgcagaggtgcacccagccccctcagtggtcctcgtgggtcacttgtggccattctgcactgagcaactggagcaggtctgattgggttgtgggtgtacctagctggctagggggacaggtgcaagtgatggggatccagccacttgtgatgcagatgtttaaaagaggggcaggaggtttccaggcacagcgagcactttccattcattgagaaagtttgtggtcgtttcagaagcagtgtgtgtttcatgtttgtggctttcatgcacacaggtgacttctctctccctgtgtattggcgaggaagctggcatctctcccaggagatgccttcagttcatttgctgtagggagtccttcctccaccctgcttgaggagttctcaccatgttttctccctggaggaaagtgggcctagcatgggtgtagggaccagcatcaggaggggtgctgcgatcagtggccagggtttctcctcctctttgtcctttactctccccacaccaggccctcaggagcctggattcctgagctccacaaccatcctaccccttccagcaggctttggcccacttgcagtgtgagtgtccaccacctctgaggtttgtttctttccttttttaaaagacagggtcttgctctgtctcccaaactggaatgcagtggtacagtcatagctcactgtagcctccagctcctgggctcaagtgatccttctgcctcagtctcttgagtagctgggactacaggtgcttgccaccatgcccagctttttaatttttttagagacagggtctcactgtgttgcccaggctggtcttgaactccaaagctcaggtcatcctctcacctcagcctcccaaagcgctgggattgcaggcatgaaccatcgcacctggccatattttgtttctgaccatcccctgacttgtcttgtgatttgggtaagttatcatttcttgatagagtccgagggccacatctgtgtcctcacactgcctcctccttcacacctcagggacttagcttgtggatgctactggctgtccaggatccttcagccataaataaaggttcactattccaaaaatgacatagtggggctcagtggctcacgcctgttacagcactttgggaggctgaggtggaaggatcacctgatcccaagaagttcaagaccaagcctgggcaatacatagtagttcccatatctaccaataaataacaaattaattcgctgggtgtggtggctcgtgcctgtagtcccagctactcaggaggctgaggtgggaggatcgcttgagcccaggaagtcgaggctgtagtgagctgtgattgtaccattgcactccagcctggtttacagaatgagaccctgtctcaaaaaaaataaaatatgaccgagcgcggtggctcatgcctgtatctcagcactttgggaggccgaggtgggcagatcacttgagcccaggagtttgagaccagcctgaccaacgtggtgaaaccctgtctctactaaaaatacaaaaattagccaggtgtggtagtgggcgcctgtagtcccagttactggagagactgaggccggagaatcacttgaacctgggaggcagagtttgcagtgagccaagatcgcgccactgcactccatcctgggcaatagagggagacgcttgtctccaaataaagatatttgatgacctgaattagcagctgccagtcacatggggcctatcctctctaaccccacacctcctctttagggttcccccagggtcctggcacagtgaggggtccacacaggagctcaggtgctgtaggagcccaggttgtctgcaggtcctggtgtgtgaccttaggaagtcatgtggccctcccttaagattgttccctgtactgggaactgggggtaatgatggagctgtggagaggattatgtggaagggtgaattttggtggttggcctaggaatggccatcataaaggctcagcaggtgtttactgggtttttgaaacctgaaaagttagcctttcatttcttcgattgtagtcatttctaatgcatgtgtcttcctgtatttctaagcagaacgtgctggatttgatgtggcctcccccatggtgtcagctgctgacaagattgggctgcagtggcctctgtgggcgggtagaggctgctggcccacatgagcatggtactaaggtctcctaggcttgtctctactaccctcagccaagctattctgcacgcccccgagactggcccctgtcacagtgaggtcctctgggcctccctggctgggccctttgacttcaggggctgttgcgttcctagaaggcgttctggcagcgccggctggccgccccctggctgtgctgatgctgggggcgggcactgcatggggctcctctgctctagctggggacctgggactgctcccttctgtactggggaaaggagagcaggcagggatgggctcagaggtctgggccagccacacagactctctctctttttcctgagctctttagccagcactgtggcagtgctcaccataatggattcccagagcggtcgttggacctgaagtctccaggaagaatgatggctgagtttcaaaaatcccatcccagctgctcacctccacggcctctgaggcagagaagcagaatgtgttctgtcttcctgggccccacaaagcaggctctgggcttttctctcacatcccagccaagaggagctcaagttacatggcgggagaagtgtgatggatgctaagaagggagttgagggaaccgcagaggggctgcggctggcgagaagcaggtgggcctcagggcatggggagcggggtgactcgggaggacaccagacaacccccaggagttcttcagtgttttttttttggagactgagtctcggtctgtcatccagcatggagtgcagtggcacaatctcggctcactgcaaactccacctcccgggttcacgccattctgctgcctcagcctcccgagtagctgggactacaggtgcccgccaccatacccggctaattttttttttttttttttttgtatttttagtagagatggggtttcaccatgttagccaggatggtctcgatctcttgacctcgtgatccgcccgcctcggcctcccaaagtgctggaattacaggtgttagccaccacacccggcctagttcctcagttttggggcacagcctgtgtctagacaacagagctctctttctatcagctgagtgtctctgagtgaacaccaccccttgggaaaggagggaggactgcgtggggtcccagtgagcagcccccacgtccaggttgcagtgaatgctgccagaattgtatgtcagcacacccactacacaggggcctgacacacaagatattgcccggactggcctgggcaacacagcgagaccccacctgtacaaaaactttaaaaatgcagtgagccatgatcgtgccactgtgctccagcgtaggcaacagagtgagagaccctgtctcaatatcaaaaattgaaaattgaaaaaaattagccaggtgtggtagtgtttccctgtggtcccagcagcttgggaggctaagatgggaggatcactggagcccaggagttccaggctacattgaactatgatcacaccattgcactccagcctgacaagagtgagaccctgtctctaaaaaaagaagttgctcagtggtaggactaacttggggaactgataactgtgtcctttttctctgtcacaggatttttctttttctttttttttttttcttttttttttttttttttgagacggagtctggctgtcgcccaggctggagtgcgcagtggcacgatctcggctccctgcaggctctgccccccggggttcatgccattctcctgcctcagcctcccgagtagctgggactacaggcgcccgccacctcgcctggctaattttttgtatttttagtagagacgaggtttcactgtgttagccaggatggtctctatctcgtgacctcgtgatccgcccacctcggcctcccaaagtgctgggattacaggcgtgagccaccgcgcccagcctgtcataggatttttctaggagtgtttcttgaaggcaggtagagagactggatgaagcatgaggaattgctttctggcttgactcacttcactccaggtgctgcctgaagctggggtgcctcccagcctgcagactgcctcctccttttccatgggaccctcttcagcccctttcattgttgggcagctctggtctcccacatgaccttcctagagctgttctcatcttgagtctgcacctgtctggggggcctctgtgcaggctgctgttggtccctctgtcagggggtgctttaaggctcagtgggtagttacttgggtaaaccctttctttcccccttctctttccctgctttgtcccagggtagcatctgagggaggaagtggagttacagtgatatgggttagctccccaggggccagcctgggccattggctccattagcttagtggtttaaagcagcgaggtattgacgtttttcagtctgtcagttctgctggttggctggtcccgcccagctgggcactgttgctggggccctctggtctttgcagttgcatgtcagctgggctgggtgtccccagtggtttcatcactcacatgtgatggccaaaacagctgggactggctggaccagtctctgtgcctgtctccatctcccccactatagcgggggctagtgtgggcctctgatcccgtggtggtttggggcagtcagacctcagctctcctagagcaagcattccgagggctcaggcagaagctgcaaggcttctgtgacctcacctgaaaaggctgccacgtcacttcctctgcattctgtagtttgggaattgagccataaaaccagcccaggtcaagtactacgggggctatgagtagatgcagccagagcctccggcctcctcaggactgcagagatgggccgggggccttgcagagtttggtctggtgtacagggtttgtcagccatgagtattagggctccttcttcatatccacaaaagcgcttggactcaaaaaataggaatttggcttccagggtctgttgctttacaaagacgcacgatgacacacaattcagaaatccttgtgagtgagtttccctttcctccagcagcacaacatctatgtgcacgagggaagcagctgcccaccgtgcaagggggtccatcagtccgtggcgctggttcctcctgaactcacagccccaaccctggaacctccatcaaggcaagaggaggaagtgggcgctccccagccttgccaggcccccagcagacccagtctgcccttggggggtttgtgaatgttcaggtgtcacatttcaggacctgtttactgagattgtctgctctgtaatgggctcccactctttcctcagaaagctgtcaggtcaggcagatgtttcaggtttgccattgcttccatctgggagctgcaaggcgaaggcacgggcggcctgtttgctgcccttatcttcccagtgttggggaccccaggaagtactgtcttctaaggcccgacaatccaaaagaaaatcactcctgcatgctcctatccccttcaaggttgcatcctgtcagagcatccatcttgcctctggaggccgtggtgctgctgccatctgggttttgggggctgctggatgtgggcggctggctctgaagaggcagcatgtgatctgacagcaggatgctcccgccccaccaaatgacagccttggggcagctcccggcaaacaactccatttccttctccgaggtgggaatgggacctggtgcaggggacgcaggctgtcggggcaaacctctctctccattctaggggcatgcagggtggctatgagtgctctcaggaaggtcactgttcccgaggcctgagctgagcactttcagatcagcagggctgcctgatccccctgcagccagccggctgtctaaggtgcccgagcctcctcagcactgaagtctcacctcaccaggcagccctgagaggctgcgggacagggattcctctgccctgccatgcaggagccatggagagggaagtgtcacttgcaagaggcagaatcaagtgagacccaggtgtcttctagctcactgggtgagggctctctccacagcctgacttgccggcagtcgtttgaagtccaaggctgggcaagggtggccagtgagctccaggcctcagcttgctaaaggagctactccacaggagcatgcgggctcagggctcagcaccctcacatgacaggctcagccagcctctcccccatccccagccatcatagacttaggaggagattcctggctctgaggacatgggggcttgcccccttctctggggctgtggtatcaccccagggctggatacccccttgccctttgttcatctggtcctgggaacaccttgtcccttgttgggagctgaggctgtgccacagagtggggccataggtccctgggtgctgtgccggtgccacacccacctgaaggaggtcgtgatggcccccagctcagggtgcaggaacctgcttgtcagacaggtgctgacatgtcaccctgcaaggcagggggagggagggctcatcttcataggggggtggggtggggtgccgtgcagggagccaaaggcacttagatgggcttgctgggccgagggtgggtgggccagtcactgggctgggggtggctaaggaacacagacccaccagccagcccttcttgggaagctctggggggtttctgctcagacctgcactcccccgagtggaaccccgagttctgccatgaccttcaccccgaggcaaggggacagggccgggcaggcttcctgaggcatgttgaagagggatgttctgcaggcagaacatggccatgctgggccatgtctgtgggccaggccccaggagggcgggggatgttaacagcttggttcatgtcaggtagggcctggtgagcccaagatgagtgtttgcacaagggacaagtgagctggcagggctggtgttggctctagcagagccctcatcccacccttgcacacagccagcagcccaccctgctaggcctgaaagaggtgaggaggaaaggttctagtgggaaatggttctgtggctggagaaggcattgctgggccctgcctgtctccccaagccagcctggaggaggatttcttgtaccgaggcctcacgagctacaggtcatggtcatccctaacttccctagtgtgtgcaagacttgggggatcttgctgaaatacagactttgatcaagcaggtctggggcaaggaggacacgcttcatttatacaagttccggagaagctgccctgctgctatggcggtgacagcggtggtcagacattcacggggccagccccaagcccacctacagccttgcccccacctgccgctcccctgttgtgtctgtccatcctggtagactgaaccctaaggacagaaattccttttatccaggggttcctccccactgcctgctatagcacctgctttttaaatgagctctcagcagatgtaaggaatgaatgaatgaatgaatgagggagaggggtatgtctttcctgcataccaggcaggcctgttcagagaaccacaaaggtcccagcctccaaggacagctccttcccggcactggctgaggggacactaaatattaaccacgtactggccgctggttgctgagcagctgaaagccataaccttttgctgtggaagtgggatcgtgtctcaatttaagtttataatcccggcctctcctccaggaaattctatggaagttcctggcaggtaacagaatttctgtgcttgtgaggtcagggccagtgccagcgggtcagggagtgggggtggtgcgtgtcagcgagcgggtgagaccatttacgctgataacagcctggcctgcttccagggatttttgtaggtcacataaaatctcttgatcactacgttttacattaaggcttctcaagatgggcaggacgggcttatgggatttgtcctgaactatcacatcacttccaaataaacttggtgcccgggacggctgctgtggagtgaatggcagacgctgtccctgggccacgatgccatccctctcagcatgttgggctagatttccactggttttgtttactttagacagtttttataattaaatatttccctgaaataatgcctgcaatcattttgagccacatgctctttttcctgaattaaagatctcttttagaaagtactgagactcttaaagcctctctcctttaaaaagtgagcttaacaaagtttttcattttagaaacttagaggggccagtgaccctgctgtgtgcggtgtatgtagaggtgactggagcctgtggtgcagcaacagtcccctgtgggctggcgccacacaggaagtgcctgcagctccacagccctggggtgagcctggcgcctccattttctgacagtacctgaacctttacctcccttctcaaaatgaaggctgcgtgtcacaaaccggttggaactggccgttgccatggttttcacgttggaaggcacagttaaagggtcatgtgaccaaggagggaaatgcctttgtcacatgactttttggtggcctgattagcatacaggaagttcactccctgctggctgctgggatgctgagtgatcattgatgggtggtgacatcatctcttggatgagttattgattagtcgcaggccaagatggggccagggagcgctgtgggcagagcagccctctcaggcagcttcagctgctaggtggtctggacccctcgcctaccctcttccttcaggcaggtttgaattttattagacatctcacctctggaagaagcacacgccctcaataagatgataagaagggttaagtcccttagagcttggctgtcatttcatttcagctcatgctagcccaggaattgtgtctgtaactctatacaagatgctgccttggccccctgctcccctgttcactttggaggccacctgggtggaggccagctgctgcacctctgtgctgaagccttgggactgcctgcctctgaggtgctcagtgtgtgtacacgtccagggaacctggaattagagccctgaggtcaccttgaaagtcgatcttgggcggcatggggccggcagcaaggagagacatgctggcggtttgctaagacctgagtgaggtgtcctgggttactttagaaacaaactacccggttctgggcttcagaatgtgggctgataaccccttgcctgggggattgtatacttcgaaatcgtacctttctgtccacgcccaggtctctggtgagaagctgcttcatcagggctaggaccagcgttcaggtacagccaccacgtagctgtggtgggtggaattaggagggaccagaggagagcaagtaaagcggttcctgagtccagcatctggcgagtccagggtagcattggtgaagccttaacctctggtgctctgtgtctacccttccctgaggacgcagctcatgggtgtggaggggacctcagaggtcccgagggctgctagagcagagtcaggttcttcatcctagcgactctcctcaaccctgccggggtctaattatcaactagaccctggcacagcaagagccaggacaactttgagctgcggcaaccagttaactttgtccgagtttgttctctgggtcacagtgccacctagaggacgtgtctgtccttggctggttttcctgctgacaaaaaaaatggacttgattcacttcgatgaatgtacaatgaggccgaggcgggcggatcatctgaggtcaggagttcaagaccaccctggccagcatggtgaaaccctgtctgtacaaaaatacaaaaaaaaaattagcccggcatgatggtgcatgcctgtaatccagctactcaggaggctgaggcaggagaatcacctgaaccggggaggtggaggttgcagtgagccgagattgcactacggcactccagcctgggcgacagagcaagactccatctcaaaaaagaagaaagagaatacaatgaacccagatcatcagggacagtttgccttgtgccgtcagcaaatggagctgcttggttggggacaaagtgccatctttgggacttgcgttgggtcagcgacaccacagcaggtgttcagccttgcgccttcagtagtgtcagctgtacacatacatcctagaggatcgttcacaggaaagggaaaatcagactagtgtgttcctgcctgggtcaaatgacttggggtgccttgagcacttgtctcggagcctggcctgcagttagcacagaatggatattcactgtttcccagttctgatgaataacagcagctcatcagccacactcttagacgtttgtgaccatactttgacaaaataacaaaagaggaaagcctgcaagtacttccccgattgtcccctggtgcttcccaactggtagtgagatgccgtgggccgacggtgaaaaggggaggaacaggccttaggtcaagttcacaggtggaagtgagctccccagaccgtggcaaattcattagaaagaaaaaggtgtgggggctggaatcatgagaactgtctcatgttgcagttttgagctgggacttacggagtgggcagcagggtaacaggcagaatgaccttggcatccacgtggggctggaggcagccagccagaaaccagtccatgagtagatcaggcaggtgaagagtctctggtctttgagagaacttgtgtcctagtcagtttcaaaacagacagccactgccgccatgtggggcccaagaagggccatctagcacctggtgccaccttgtgagcaagctggcagcctgtggatacacccctcggtcttctggggacaggttggctgccaggtgtgagggctttggcctgcctgagtggagagaagaaaatctggttcacgcagggagctgggctccccttcaaggggtttccaccatggccaggggctgcgggctggtggcgaggcacacacatgccatcagacccagcatgctcaagcccccacaatggctaacactgagcagggccccaggatcccgagccgagtgtttacctgatccgaggcacacggtagagggagcagccatgttttccaaagtcaccatgtcatgctcaggggcatacgcaccctcagccctggcgacatggcggcaggcatgaagtccctaccatcagggtgcccacctgggcactgggattgggtgccctatgacgtgtgggtaagaagaaggaggcagcctgggagccatggggcagggcaggggatgtggaggatgcagggcagacagggaacagacggggaggtctcagctccctgccatgtgtccacaggggtgggcactgggtccagctgtcaagggcgctctggtcactactgtctccaccccacagtgacatgaagtccgagaggagacccccctcacctgacgtgattgtgctctccgacaacgagcagccctcgagcccgagagtgaatgggctgaccacggtggccttgaaggagactagcaccgaggccctcatggtgagccacgtgttggcgctgccgccggagccccactgtgcccttcctactcatgacaccctcaggtggagctagtgatggcagggcctctgctcctcaccaaggacgctccctctcaaccctgttcctctcgcccctgcagaaaagcagtcctgaagaacgagaaaggatgatcaagcagctgaaggaagaattgaggttagaagaagcaaaactcgtgttgttgaaaaagttgcggcagagtcaaatacaaaaggaagccaccgcccagaaggtgcgtgcctgtctcccctccttcctgggccagcaggagcgcctggccttgccttgatcccctcatcaatgtcagcggccagaaaggtgaaagggcttccttgagggagtatagggcaaggtcccactcccgcatttgtggactccagtgtgcattttggattcagcttacaagatgttaaagtgaatttcagtctagagtattctggttctgagggtctaaagctcacttttttttttttttttttgagatggaatctcactctgtcgccaggctggagtgcattgacgcaaccttggctcactgcaacctctgcctcctgggttcaggtgattctcccgcctcagcctcccgagtagctgggactacaggcgcgtgccaccacacccagctaatttttgtgtttttagtggagacggggtttcaccacattggccaggatggtctggatctcttgacctcgtgatccgcccacacgggcctcccaaagtgctgggattacaggcgtgagccactgtgcccgccctaaagctcacttagacaacaggtgtcaaggaagtggagcacagatgtctggtgccgctggaagcatgtttctgggtgaagcactctgtgcagaaaggccgcctgcactgtgggcgcaggggatgccccagtctctaccatcatccctcctgctgtgtgcgtctcagtcccctcccagctgcaagtgtgctgagctcccgtggatctcagccccaactgtcgggagggtcctgcttctgtttcttcttccctggagcccgaagctcgctgttgcgctgcttctagatgcagcttaatgggcagcgaggttaagtttattttgttaggctttttgagtgctctgttctgggaaactccgaccttccaagtactttagtcattgcctcagtgacccagaaagtaagtgtgttctgggcagcaggagctgaaggaaggacaggactctctctgctctggcttggggtttgttttttgaaaccctgcccccactgcccccgcgccccctccccgccccccaccttacacctacctagttagcaagtggattggaaagagcctgctggtttcttttttctatttctttgtcacttgtcgaaaactcatggagggacaccaagtctgtcactggcccttctctactggaacatgcagctttaaaaagtgcccagagtcaccgttttctcactgagattgagatctccctgtctgggccatgggtcctttgcctcagcagtgctgccaccatcagccattctgtcccctagagggcacagcgggtgccaggatactgcgtgggtgtcagggagcagccaagaagtgatgctgagagtagggggtggggctgctggaaaatctcttctaggcccatgtagaaattgtcacttcccactgcagatggggtcactttcagccttcaagcagaacctctgagcgcctgatgccgtagaggaggaagacagtcagtcctcttcggcagcattaaatcttggcaactccgtgtgaggagagggaccggcccggtggcccctcacctcctggtgtcctgctctcttgcagcccacaggttctgttgggagcaccgtgaccacccctcccccgcttgttcggggcactcagaacattcctgctggcaagccatcactccaggtcagtgtcctttctgcgtctcactgggtgccctgctggcactgctgctgtcaagcacaggctcctcgggctcccaaacagccctggcccaggttctgcaagaggttgcgctttccttctgagtaggctggagtgaggccctccagcccacagcctaggggaagaagcacacgtgcactttccaagccccacggcccaaagtaggccactgttaatgtcacagacagaaatcatggccaacactggaagggggctttccagtgagcgcccctagcaagcctgatctcccttcgtgttgactcttccggccagagagcctccttccagggcctccaggtgaggggcagaggttttctcccagccatatggctgaggtcagaagaggccctcctgcccctccctctcaaacaggcctgagccctcagcttgctctagggggtgaccatgcccatcctgccgtgggccggccagtgtcacgtgagaatgaactgccacgttggtgggactcactcaggagtgagcccaggtttgcacggctctgggtggagtcactattccttgttccagtatctagaatcagtagtcatctttcttaattttgtgttatacgtttgccttgttagtttgtttgagacagggtcttgctctgttacccaggctggagtgcagtggcacgatctcagctgactgtagcctctgccttctaggcttaagccatcctcctgcctcagcctcccaagtagccaggattacaggcacacaccaccatgcctgggtaatttttccattttttgtagagatgaggtttcactgttacccaggctgttctcaaacccctgggctcaagatatccacccgccttggcctcccaatgtgttggaattacaggcgtgagccaccacacccagccagcttttttttctttttttctttttttctttttgagatggagtcttgctctgtcgcccaggctggagtgcagtggcgcgatcttgggtcactgcaacctccgcctcccaggttcaagcaattctcctgcctcagccttctgagtagctgggactacaggcacgtgccaccacgcctggctaatttttgtatttttagtagagatggggtttcaccacgttggccaggctggtctcaaacttctgacctcatgatctgcctacctcggcctcacaaagtgctgggattacaggcatgtgccactgtgcccatccataattttctttaacttctctgctacttaaaaaaaaaaaaaaaaaaaaactagtatgtactttcataaaagcagcaaaactgcttgctttaaaaaaagtgtgggggggtccggtccatgtaaatctgggtcttggtatcgttggcagacctcttcagctcggatgcccggcagtgtcatacccccgcccctggtccgaggtgggcagcaggcgtcctcgaagctggggccacaggcgagctcacaggtcgtcatgcccccactcgtcaggggggctcaggtaagcagggctgtgcacatgggggagacctggcagcctcagcagtcgtctaccttgaaagtagggcccttcccagtccttgggggcaaggtgccctgtgccttccggtcccgctccattgttgatctcagtcagatttcttgttctccccaccctaccccaacagcaaatccacagcattaggcaacattccagcacagggccaccgcccctcctcctggccccccgggcgtcggtgcccagtgtgcagattcagggacagaggatcatccagcagggcctcatccgcgtcgccaatgttcccaacaccagcctgctcgtcaacatcccacaggtgagggctgcgccacactgtgccagggagagtgtgtgtcccacctgtgactgctccccttggacccaggttctggggcacagtagtgtttccctgggctgtgtggcatgacctgccttgctctttcagagccaggcaggggcttggacttgagctcctgggggccacagggctgtctgggtcgtgggcagaagttttgtgggcagacttgctatccagcacaggtgggcagctgacgagaggggcgatgcacggacctgagctgaaggtggggtctgcttaccagccccatggctgaggaaacagcatgtggcacacagcaggtttagggggatagtcgaggcccaggagaggccggtgatgggcccggagatgccttggggggcaccggagcccatgccgccctcccggcagtggcttcttccgattgcctcctcagcaaatgttctcatgtcaccaggtgcgcctattcttagccgcacgtcccttcacctctgtacagagcctctcagatggggagggtctgtccccacccactggaagtaggatgggaagagcagaaccaaggggcgggtgggctggaaacaggcgccttggctgacagataaaattaccaggtctgcaggggcttttgttggtgggcgtgttcgctctttcttccctctttggcacagtttgttcttgcccaccctcctcagacaagagcaaggctctgggcagtgtccctgcctgctttcgaaggtcaggttcgagtgcagagaagatggctagtcctggactgacccaggcaggtagtttcatacacctgttgactttttttcttttttggagacagtcttgctctgttgcccaggctggatggagtacagtggtgtgatcaaatatctttattttattatgagacaagagtctccctctgttacccaggctggagtgcagtggcatgatcttggctcactgcaacctccatctcccaggagatactcctgcgtcagcctcccaagtagctgggactacaggcgcctgccaccatgcccagctagttattgtatttttagtcaagacagtgttacaccatgttggccaggctggccctgaactcctgaccttaagtgatccgcccgacttggcctcccaaagtgctgggattacaggcgtgagccaccacatcctgcccacccgtgaacttttatccagtcctttctcttgtctttgtttcctgagggtgggcacaggcagtcagtggcagagaaggtggtctgctcctagcgtggctgggggaggctctgaggggaaggaggaggggaactggctggtcagaggtgagggaggcctgggtttggtcttggttgctgaggggacaacaaaccagcaggccggtctctgggaacctttcttggggggtgggaccctgggaaggcatcctgcacaccctgtgccccacagtgtggcatttgcaagtcattgggtgtgtccattttctgggggtggggtgcacagctttcatcatatttccagaggggtcctcagcccctaaaagcaataacattggcatgtgggcagttctgggtttcagggagagccctatccagcagttgtggggctggtggagacagtcaagggtctgctcctgggatccaggcaggactgtgaggtggcactggagcggtgaggactgggtggagggcaaggggaagaggttggcctaggagctgcttcccccatcgccccataaggactcggggactacctcaaacattagcatcccaggggagcacatgcagagaggctcatgggggtgctgcggtgagcaccctcttaccctgtgagaaggcagtaggccaggccacagccagaggacagtggccctgctgggcagtgtggtgaccaccagaacctggtgacagccacatgggtgccctcacattcacatggcggagcacagcaaactatagattttaagtgtgtgcggtttatctggtaaacctcggtgcacatgtgcagatgagcagccactacctagggtggtgtgtttctcgcgcctctccctgctgccctggcttctgagagcctgttatcatggctgggttcacttttgttaaggacgccatcgtcaagggtactggttagtgcagttgacaggacctcgggcttcggggcgctggggagccttcctctgggcaggcgcacggagcgccctgactgagtttttgtctcccaaagcccaccccagcatcactgaaggggacaacagccacctccgctcaggccaactccacccccactagtgtggcctctgtggtcacctctgccgagtctccagcaagccgacaggcggccgccaagctggcgctgcgcaaacagctggagaagacgctactcgagatccccccacccaagcccccagccccagagatgaacttcctgcccagcgccgccaacaacgagttcatctacctggtcggcctggaggaggtggtgcagaacctactggagacacaaggtgagtggcctggacccagccgggctgcttccgcctctggcctccaagggtgctgccccgtgggttctttccaacacacagcagaggctggggcagggctgcctagccaggatggtcctgggtgggcttggcagggacaccgtcagtgccactgtggagtctggacactgtcctccggttggggcctctgagagccaggccccgagaggctcagggtccagggggacgggcagtagtggcctccgtgacgttggcgtgtggtggggtagacgtgagggtgcacatctgtgggaggctgacagggttggcctccacgaagggctctcaggccaatgtggagttgtgacacacaggcagaaccttccagagcctcaagtgctcccagcttctgaggagggagagggacagcccaccccactgcccaggggcaggctcgcatgatcaccctcttcaggcagcgtgggagtgcactgtgtcctgggggatttaggaataaaaagacatctacggggtgatcacagcattggagacggctgggcgggtggatctgagtggccgagttggcccccagggagcccctgctccccagacatggagaccaaggacgtttctgcccacaggttgaggttggggtgacacgagtaggccaggaggctgagtcctctcctggtgactgcatcagactctcagagcagaggagtcggcaggactgtgaggggcccagggcaggggcagggcctggcagcctcagagccttcccagcacagacttgggagcagcggggtgggtgtgtgcagagaagcacctcccgcgcactgcccaggatacagagggaggagggcatgggggccaggtcgagctgtgcccccagcacctggggttgggaagatgctctccccactctcttagggtactttggtgcatcaactggtgcccccatgtggttgcacccagggtccccaagaggcagagctctccacacttgcgtggggctgggcctggcgcagcctcagagtggccctcaaatgtagagttgcttgtaacccactcccttgcccctcagtcgctctcgtaactcccggccacaggatggtaccgagactaactgcagcgtgccccaagggcatggcctccagctcccagctgcaggagggacctgggggagctatggggaggtgaggctctgacacagcccggctggtgcctttggtgcctccttttcgacaaggtgatgtcggcaaaagagccacctggggctgctgtaggaaatgaggattgggggccgagttgggaccagtgcctctccttgcccctgcctgtgcgggcatccgctctcccagaccagtctgtctctgccgttccctcatcagggctcagtctccctctcctgttgccaaggataggacctcactgtgggagagactttgagccctgctggaggcatctcctgacacctcccagagcccccagcctcgcaccatgtctggttctggcgccgctcacgctggccatgggttggacgtgtgcaaggagatgtgccgttgtcaccagagcatgtaagctgcaggtggcggtctcatgggtcaggggcttagaaggggccaggccagtccaggcaggagagggaaggccgagagtctcgccacatccatctccccaccccccagcccctgcagtcctctgacattgtctgtgatgaccaagagcaattaaggcccctaagtgctgaacacaaaaaaggtcggcacaaatacgcccagacctcacgcccgagcacatgcttcatgtacacttccccagctacctcttgcagcccccaaggagactatgcattctgtcccccagacaaggggaccaagcccttgctgcccctgtagcctgctgcccaccttgtgcagtgggtgcagcccaaggcctggggcctatcccgggtgtgagtcctgccctgccactgagtgacaatgtgatctacaggtcacttggtctctcttggcctcagtttcctcatcaggacatggcgcatttgggggttccccgtcctaagaatgaactgagtacctcagcacccacaaagcacttgctgggtgacttgcctgtcacccttattaactcgtacacaagcaagggtgcccaccacactgaggcagggcttggcatggtccctgctggtcctcagtggtgtcatgtccagcgatgggtgggacaggaggccgacgttttctgaagctgttcggcgttggccggccccatgtccacatgtcattggtgcccagtaggcatttgcagaacggacagactgtggcgactgagactccagcatcctgggctgggggcggccagggccctgactgtcgtcctggccctctgacgtgagccatgtgctgtctgcttgcagcaggcaggatgtcggccgccactgtgctgtcccgggagccctacatgtgtgcacagtgcaagacggacttcacgtgccgctggcgggaggagaagagcggcgccatcatgtgtgagaactgcatgacaaccaaccagaagaaggcgctcaaggtggagcacaccagccggctgaaggccgcctttgtgaaggcgctgcagcaggaacaggagattgagcagcggctcctgcagcagggcacggcccctgcacaggccaaggccgagcccaccgctgccccacaccccgtgctgaagcaggtgagcctggcctgctgccggcagtgccgtccctaggaggcagaggccgttccgcgatccaccccacgcctgcgctgcaccgcctgattgttaactgcacgtctaaattgcagttaatggtggtgttgggcggcaaaaacactaatttgcagtttctttagactttgtagctctcacttgcaggctgccggctgacaagtactgcttgtcttcaaggtcttttctgaaagccacgttgagataccaaaggggcgtttggaaaaatgttcttgctaaatttggagaggaacaagtttgaaatcaagttttttgttctcgtgttgttttattttaatgcttctccttcccaccctcttgtagactcgaagctcccttttggcaatttttgttttcttggaagttctttgcaattcactaaacgcattttctcaagatccccacttggcgcctaaagtccccaggggacgggcctgtcctgtggggctcaccctcggtcaccctgggccggccagcggaccgcactgactttgctttcaacccccgtttgtgtaggtcataaaaccccggcgtaagttggcgttccgctcaggagaggcccgcgactggagtaacggggctgtgctacaggtcagaaccgcactgggcgccgggagcctcgcgcccccaccgcagcccgtgaccacgtcagtcgccgactgtcacgctgcctcttctgtctgtctctccctgtttctgtttcactctctcccctcccccacccctctgtgtaacttacctggtctcctgattttggactttagggaccccatgtgggtgggaagaggtcagccagagcaaggagaggctgcgctgagtgtctcgcctgctgctgtcttttccctgcatgagccgtcacccccctttctccactgcaggcctccagccagctgtcccggggttcggccacgacgccccgaggtgtcctgcacacgttcagtccgtcacccaaactgcagaactcagcctcggccacagccctggtcagcaggaccggcagacattctgagagaaccgtgagcgccggcaagggcagcgccacctccaactggaagaagacgcccctcagcacaggtgggtgacctccacagggctccccaggggacctgcccattgtggggttcacccttccttaaccgaaacagaggcacatgtgcagcgggtgaacccccaggcccgcttcccaagctcagcctcctcggactctggctttccctcttgcccctaaccaggataccctgaagaagtgacagccccgagcagataggaaatagtaaccaccctcactctctgcacccaggctcagtctttgaccgacaaaacatgggccaggcctggctcagagggtgcccccacagccatccatgtggactcttgtcagcacacacccctatcttgcccactcagggtcccccttttctctttgtgccgcagcaaacatcttttttctgtcattgtgccatccatgctgcggtcacactgagtggtgcaaagtagaacagtaatgcggggcagggggtgtgcccagggcagcggctggctcacccggggcaggtagtggaggccttgccggagacggtgtttgaagaacaaccagtgggggtgaaggtcctccagtgggctctccggagtcaggtgcggccccaccgtccctggcatggtcccgatggcctgtttattttttcatgtatgtgttaacattagaacaaaagtgttatatttcttgtgtcaaaaatagggaaagaaaaggtggtcaggaagggccaagttaaggagatgggcaccctctgggagaggaagcaaagtgtcccacatgcaccctgaagcctgtggccctgcaggtaggagaggacaatcatgagacaggccccaggcagagtggtggggggagcctgagagcctgctgagcctgccgctgtcctaagtgaggggcgtgcccaggtgccaggctctgcaggggcacttcaggaaacagcagacgttcggctgcagaggaatccaggcagcctggacagttgagtgtgtttgtcatcaaaccagccagccagacgttctgctcagcaggtttaagacagctgaggactcacgggctggtcagaaattactcttgtgggaagtttgaaaggataagaaagaagtagaagtcgataagtgtgtgcatgtgggcacggtggtggaagtcatctggaagctgtgtgtgtgtgtgtgtgtgtgtgtgtgtttaaagtttgaaagggagcatgaaggcatcactagttgtgtgtctgatggtaggattagagggaaaataaatagttgaaagcaccatttcctaaaagagttaccacgggggttttgagagagcgcctggcaggacccagttgccaggtttctggagtgctgcccttgcacacagggttggttcctaagaacatttgacctgggaacgctttttccacaaaatgtattagccaccactaaaaatactcttagggccagacatgctggctctcacctgtaatcccagcactttgtgaggccgagatgggaggattgcttgagcctaggagtttgagaccagcctgggcaacatggtgagaccttgtgtctacaaaaaaataattagccaagcacatggcatgtgtctgtggtcccagctactcagccaggaggctgagggaggaggatcgcttgagcatgggaggttgaggctgcagtgagcactgattgtgccactgcactccagccttggcaagagtgagaccccatctcaaggggtctggggcagcccttacctccaactctggccaaaaattctgcgtgtgctgggtgggggcatttatttattttccaattataaaaatgatatttgtccatcatggaaatttggaaaatacagagagaaaagactgtggcaatggcttgtattttcctcccccaggtgaacaaatattacatttaagggttttccccagtgtctccccttcacttgagggtcctttgtggaaatgtgtgtcttgcgttggctactttgtgtgttaatgagagacccttactggacgcattaaaatttgagctgggcacagtggctcgtgcctataatcccagtgctttgacaggccgaggtaggaggattgcttgaggcctggagtttgagaccagtaaacaacaacaacaacacttgagggtaggagatagtttttttttcctttttttttttttttttcttcttttggagaagcttcttgctatgttgcccaggctggaatgcagtagcgcgatcatagctctcttgcagcctggatctcctaggcccaagcaatcctcccacctcagcctctggagtaactgggactacagggatgtgccaccatgtccagctgatattttttttagagatggggcctcactatgttgcccaggctggtctctatctcctggcctcaagcagtcttcccaccccccagcctctcaaagtgctgggattctaggctgagcctccgtgcccagctaagatagtttttcattgctgcatagtattccatcctgcattattgtcctgttgcacacatttgtttatggttttccactgttctaagcagcaccgtggtcagcaccttcatttctgtagaacgtaggtagctgctcaccctctgatgattgccccacacttgggattaccttggcagagcctggcaatgtcaaggccattgagttgctgcctaaatactcttcagctctgggggggcctgggatttgaaacgttgattgaggagtagtgtgggtgggtttgcaagggctcctgggtccttagtctgtattggggctggggtctaggcagctatggctgggctcctcccaggagccctcctgacgagggccttctcagctggtcgctctgttctgttgcaggcgggacccttgcgtttgtcagcccaagcctggcggtgcacaagagctcctcggccgtggaccgccagcgagagtacctcctggacatgatcccaccccgctccatcccccagtcagccacgtggaaatagtgcgagccaggccccgtggaagacgggctccctcctcccccacctggcccctggtctagaaggacccactgcaccaccctccgctggctcgggaagacaccgtgcccgccccaagagcaagcaccggccatgctgcagaggcaagacctcaattcttggctgcaaagtttcatcagggctagggggctggtgccgcctcataggcagacgaggatcatcgctgggggacctttcccgtgggctttcttcctttctctctttgcctttagtttgcccgacaccagcagaaaagtggaccttgggggctggttctgctcctggcccccttgttcagcccctgccggcacacgggcggctcaccctggacactgtgatgcgcatgggcaaggccagcgcccggggcttctgaaccgagcggggtgtttcatttttttgcttttccctgtcttaggctcccagtctttgactgccttcccatggcgatctataagttgaaagattttttttttttttaatcacctcatgatgatggagttaaaagtaaaccgtgcagaccctggggtccctgttgtacgctgcatcatcccgctggccctgtgccctggagggtgggcggctcatggtgccacagcccctggcagggacggccggcccgcccccgtgactgactgacagatgcagggatggccgaggcagccctcgctccagctgaacgcctccattgctgcttgttctggagacccccgcccccgcaccttccagacttagcagaagaacaaactgaagaacagacccagccagagaagcagggattccagaagctgcccattaagggagaaggagaggatccggtcggcagcagccctgagcagaaagctggaggggggactgtcgcggggtttttctgttgtggtttattttattaaattttttccttttttctattcatttcgatggacgcaatcttaagccaccctggccttgctcctgggaggtgagcgtgcacaggtgtgtgcaggtcaggaggtgccgtccaggtgtgcggcgagccgctgcgcacagatgtcaggatttccgtttgggtctagtttagaacctgtccttaaacctaggggttgctgtcaggatttgctttcagactttttttttttttgtaattccctttagagtctacaaaaatgtttttaaaaggatcaggtctgcttttagtttcatttttgtttctttcccgtcccactctttaaaaactggttccgtgaggaaaggcagaagccgttccgtgtctcttgcaggctgggccggcttcatgccagtgcgagggcgtcccgtgcccacgtacatacgtatgtctccatgagttctgggctccactggttccaattgagctccagccctggttttcctacccatgcagttagggactttaatttaattttttttttgtagggccaccgccttcaaacacaactgctacaacattctaataaaggctcatttaacccccaggctcctgtcgtgtgaatatcctcagtctgtaggaaactttttttgacacagcatagaagacctagttttggaaaacattatctaattttttgttgtgcaaatccccaaatttctcactaatttttgtttttttgtgcataacttggatgggctgaaggaggtgaggacagattggggaagggtggctttcattccaagatccagggatttggggaaaaggaaggaatttgatgttttttggggtgggaggggagggtgtgttttttacaccaaaaaaaaaaaaaaaaatcaagagtatgcaagcatttctattcctcgcatttttctgtgtgcctggcaaataaatacctgtctcctacgaccctgagctgttagccctctctgttccatgacaggggccagatcttccagctcctcccagaaggagcacccaggctggcttcttcccactgaaagccctccccagcgaaccaacctcagttctatgcagtggctggggatcaggcatccagaccgaagtcacctctgcctgctccagcttgggtcagctgggtctgaccagggggccagatccgagccgcacctgccggcccccagccccagctccagctcctgacctctcccagcctggcctggctgttcctccagggctgatggctgtcaacccatccttgtgagttcatatggactgctgcccctcgaaagggagagggtcggccccatgtccccagggagcattccatcagggacaacgtacatactgtgatgtaaactttttttttttccccccagggggcaaaagtgtgagatgccttaatctttccttcatttctgctgtctcgaacactctagcccattatttcctttcagttccttgcagcataacctctacgataagccccaagcgggttgttgtattatgacgtttatgatgttccaggtgaaggcattattaagtacctctctgggtgtggggtttggacgcaccaggatagctattgattaatgttaagggtgttctacccacagcaaagcacaccctcttaaaccaggcactgcctgggtcctggtcccgagagccctaccaggatcaggttcctgcaagccgtcagaatgtgggagcccccagcccaactgattgtaactgtcccctgttacctgtgacatgaacctccaacagcacctggaaacggttccctctgtcagctgctctgtagacagggctggggagatctcagagttcacacctcgcctgttgtaggggaggttgggggtagggtttggaatggccaagtgcccttggaacctcccacagctatggccgtcctgacctcatcccaggaactctacggtgaccaggaaccacccctctgacgaggtctgtagcggcccttctcagagtggaacagcccacagtgctagttgtgcctggtcttacctgtactccacggacctcggtgaagcaaaagcttcagggcagagggaatgaggcaacccagtggcagccccgctgggccccgtggctcctgctctcctattggacgtagaggcaggggagagacttctctatacaaatattctcatcacagaagggatgatccttgctgctctgccgtagggtttttgatgctgagctatgctgcacatgacgttaacctaaagaacttggactgagcttttaaaaaaggacagcaaacaattttataatccttaaagtgtaatagacggttacactagtgcagggtattggggaggctctttgggtgtggaggctgtcacttgtatttattgtgactctaaatctttgatagtaaaacaaatgtaaaaagaaatgtttgccaccagatgggaatagaagttccaataagcaggctggaatgggtggctatacgttgtatcacgaggaagttttagactctgaaggataataaatggatgatgtgtcaactggacttttcttttgtcccttctgccctggcttctctgtattgtttcgtcctagcttcccaggcaggttggagggagatggaggatgacccttagttaatgagagaagcaaagggcggggtgcatctgctgctggggcctcacttactgtggggatggagtccccacggcccctctcctctggagctttgtggcaaacttaccccatgggctgggagagaggaatgagaatctcagtgggggctgggtttggtggctcacatttgtaatcccagcactttgagaggctgaggtgggtggatcacctgaggtcaggagttcgataccagcctggccaacatggtgaaaccccatctctactaaaaatacaaaaattggccggatgtggtggtgggtgcctgtaccccagctacttgggaggctgaggcaggagaatcgcatgaacccgggaggcagaggttgcagtgagccaagattgcgccactgcactatagcctgggtaagagaccgtgactttctcaaaaaaaaaaaaaaattctcagtggaatttgcttgtgtttgctgcatcagccttcacgctagagtggtgggttttcctggagcaattttcaggctgggggcctcgatggtgtctttgctgcaggatgtgatattacagatgtgcaatctaagcacagagtcaccaacctggatccaaaatgaacgacgtcctggcaaaaatgttttcaagtgttgatagtttcaagttttattcttaaggtgagacctgggatcattttgctgaattttaatgtgcataaaacatgaccctgttttcctaggtgctatttatttgaggcagggtctcactctgttgcccaggctggaatgcagtggcttgatctcagctcactgcagcctcaacctccctaggctcaggtgatcctcacatctcagactcctcagtagctgggactatgggcatgcaccaccatgcccagctaattttcgtattttttgcaaagacacatttttgccatgttgcccatggctggtcttgaactcctggactcaagcagtcctctcaccttggcctcccaaagtgctgggattacaggtgtgagtcaccacgcttggccgtttcttgtctttgaagcatccttgcctccggcctgggagctcataccttccccacaactcccaagtgcctggtcttatgggcacagagctggtagagaacatggtagaaactgaacctcagcctgtccagtagcgcgatcttggctcattgcaacctccgcctcccaggttctagcgattcttctgcctcagcctcccgagtagctgggattacaggtgccgccaccagcacgcccagttaattttcagtagagatggggtttcacgtgttggccaggctggtctcaaactcctgatgtgatccaccggtctcagcctcccaaagtactgggatgacaggcgtgagccactgcacccagccacttttttttttttttttttttgagataggctctctgttgcccaagctagagtgcctagaggctctctgttgcccaggctcaggcgatcctcccacctcagcctaccgtgtagctggggccagaggcttgctacaggcatttcttgcttggcctgagaaacattcctatggggtgctgtctcctgggcttggctcttggttcctcgtgaggctctgcttccctggattgggcacaggcttgtcagtgcagttggggcagattcaaggggcgggtcctgggtcatggtctcaaatagcctctccagctgagaaaatgggacactcccctcgtccctgacatcttgtccccgacatctcatcctctctgaattgagccttgggtctgtggccacatggcaggcagagaccctgaccccatctgctcccacagattcgtcggtggacagatggcatgcactatgccctgggccccggagatgtggcaggagctatccagacagaaacatatagcaccttgagaggagggcatggggtgacattttaggcaaggcttgaagaggggaaaagtgccaggagtgtgcaaaggcttggagataggagccagcatggcaggtcaagaacaaaaagggcaatgtggtgggactgggtgggaagacggggcaagggcgtgggttttagctaagtgcagtgggagtctagggaaggtcctgggcccagtactcaagctacgcccactctgaagccatgcccactaccccaaggatggggttttgcccattttccaagtggggagtctgaggcatggccccagtcaggagcagcacccttcgaataaaccagaggggctaggggctaggttttattttatttatttattttttcttttgaggcagagtcttgctctgctgcccaggctggagtgcattggtgggatcttggctcactgcatcctccattttccgggttcaagtgattctcctgactcaggctccccagtagctaggactacaggtgcaagccacccatgcccgactaaattttgtatttttagtagagatggggttttaccatgttagccaggctggtctcaaacgcctgacctcaagtgatccgcctcccaaagtgctgggattacaggtgtgagccaccatgcccggccccaggagctgggttttctacctccactctgatgtggtccagccaagactggaggctaggcactgcccctcttttagcctcggtttcctcatctgcaaaactgaaggggacagggccatgtatctatttggagggatgaagatagagctggcactgcatcaccagggcaccagaaagccattgagactgagtgagcaggggctgggcatggggagacccaccagaggagcagctatgtagggctcatatgcaggtaggcacgattaggatttcctaatatacctaatacatttccccatataccccaaatgggaaccactcccaggctctgtggggtcctctctcaatttcctccttaccttgccatctcctttccctctctccctccttattccaggcaaataagcttactggccttactcaaacacgccagctcccctcttcctggggaacaacctggactgtttctcttaccttcagagtcccttgactttttttttttttttttttttctgagacagggtctcactctgtggtccaggctggagtgcagtggcacgatcatagctcactgcagccttgaactcccaggcccaagcgattctcccacctcaccctcccaagtaactgagacacaccaccatgcctggctaatttttaaattttttgtacagatggccgtctcgctgtgttgcccagattggtctttaactcctgggctcaagcgatccgcccacctcagcttcccaaagttctggaattataggcgtgagctgccacgccctgcccagagtccctccttgaacacctcccaactctacctggcatttagcacaacttacaattattttatttccatgtcattcttttattttacttgacttttcaattgtctcgttttcggcagggatgggcccaagtctcttcgccatgagctctggggcctggcagacagtaggtgctcaagaaatgcatgactacatgaaggaacagaggaaggaacgagctagtgagtccagctgaatctcgcccagccccgccctgactcccccaccccctcttcccgagaggaaagggacccacagcagggagggcttcccccacccccgcaacgtcactgttgctagatctgggttcaaattacagctgtgagccgggtgaagtggctcatgcctgtaactccagcactttggggaggtcgaggcaggtggatcgcctgaggtcaggagttcgagaccagcctggccaacatggtgaaaccctgtctccactaaaaatacaaaaaattagccaggcgtggttgcctgcgcctgtagtctcagctactcaggaggcagaggcatgagaattgcttgaacccgggtagagactgcagtgagccaagatcgtgccactccagcctgggcaacaaagagagaccttgtcctaaaaaaaaaaaaaaaaaaaaaaaaaaaaaatcacagctgtgtcttttttgtttgttttttgagacggagtttcgctcttgttgcccacggtggactgcagtgacacgatctcggctcactgcaacctccccctcccgggttcaagcgattcttccgcctcagcctccgagtagctgagattacaggcgcccgcccccgtgcccagctaaattttttttgtatttttagtagagacggggtttcactatattggccaggctggtctcgaactcctgacctcaggtgatccacccgccttggcctcccgaagtgctgggattacaggcgtgagcaccgcgcccggggtttttctttttctttcttttttcttttccttttttttttttttttttttttttaagaggcagggtccagggcgcgttggctcacgcctgtaatcccaacactttgagaggccgaggcgggtggatcacgaagtcaggagttcaagaccagcctggccaagatggtgaaaccccgtctctactaaaaatacaaaaattagccgggtggggggacacgcgcctgtagtcccagctacttgggaggctaaggcgggagaatcgcttgaacccgggaggcggaggttgcagtgagccgagatcgtgccactgcactccagcttgggcgacagagcgagactctgtctcaaaaaacaaacaaacaaacaaacaaacaaacaagagatgaggtctcggctgtgatgcccaggctgttttcgaactcctgacctcaagatatctgcccgcttcggactcgcagtgttggggttacaggcgtgagccaccgcgcctggcccttggctctgccttttggcaagtgacatccatgtgggcctcagtttccttatctataaactcctactttacgtggagacaggccaccctcgccccacccctggctgttccattcttaaaagatgtggacggcgaggcgctggggtccacttgcttcccagcccatcatcacagcgacatcacgacccggggacaacaaagctcctttgagtttgcccatactggggagctcaaaaggtccaggctcgaatcctcccgactcccttttgagtcttggagcaataacctcaacatgcgtgactctaaaatagggtacccgcgcctgccttccccggatggagcgatcgcttctccactagtccgcaaatgggggccaccgttagagccaggtgcgaggaacagcgagtttattgcaggttccaaccgggaacctggcacccacggctggttgggaagggacgccctccgcgcagaggctgagagttccgcgcaggcgcaatgcttccgtcccctctggtctcgccctctcggggcctggtcgcagggaatcgcggatgcgcatgcgcctccagctcccgggatcgcggggaacgtggattccgaacaagggcaactgcggactcccccgtgggaagaaagggagggaagcggaagggaaaaagcgcatgtgcagcagcacgcggcagcttcgcatattccctcgaagcgcgcctcttgcgcgtgcgccgccctggcccagtgcccttggctgcaggaatggctggaaccacccggcttctagccggagtccccggcgcgcagccagcagttgcgcgctacctggcccgcggagggcctggcggacgggctgaactgcagcagctcggcgatcagggccttgcagcgctcggacagctcgaggccttcgggatagagcacgccgcgtttctggcgccggggcaggccggcgatgtccgagtcgtcgaagggcatgcacccggtgaccatgacgtagagcacgacgcccatgctccacacatcgtacttcttggggtcgtaggggatgcccaggagcacctcgggtgacgcgtaggcggctgagccgcagtaggtggtgctcaggtctgggtagccatgggcctggcggccgaagccgaagtcggtgagcttgacgcggcgctcgtccgggctcagcagcacgttttcgcacttgaggtcgcggtgcaccaggtgatgatcgtgcaggtagcgcacggcgccggcgatctgcgcaaagaggtcgcgcgcctgaactccggggatgcgcccgttgcgctgcacggcttgcagcaggtcggtggcggccgcttccatcacgatgtacagtttcccgttgcacacctcgatgaactcgaagacgtgcacgatgtgcgggtgtcgcacgccccgcaggatggacagctctcgcggcaggaacttgttgacgaagtccgggggcgctcgccgccggtccaccaccttgatggccacggtacccttgtacttcttggatgtggccaccttcaccttggagtagctgccctctccaattgtgcggcccagcttataaccgagttcgctcagaagtttgtctcccgacatggtggcgcctagggcgcacggggggcaggaggcggctgctgtcggggggcggccggactccaatctcgggtctaagccatggcgcttggcacctacacccccgcacccccatgtgcccactgccagacattggccgctgttgtgccttttattgccccgtaacaatttttgccttgtgaagtgactgcgggcgtcactccgccttagggtgggggtccgggaccccgccccggggccaccctagcctccctgctttgtgactcataatcatcctgaatggtcagtttccgatgagaggccactagcaagggatacccatcaccaccagggagcagaatccgttccagggattggggtgagtccgacttcgagcagcagctgccccccaacatcatgtacccagcccgtgactacgtggagccctgggcttcgcgtagagtccctagacggggcgaaaacgggaaaaggggccttaactggggcacctggctcctttgagagctcggagtttctgactggcctgcgcaacaccccagaggcaaggtgaacgcgagggcctataatgcaagaaccaaggcgagtcacgccctgtctgggcaaaagaggagtaaagacccctcagctgcagcccggcagcgcattcctacccagggtccgccgccagagctttcccgcgcggtcggatagttacactactgtccgggacttcctagccgtgccgcggaccatctcaagtgcttccgccacactcatcatggcggtggcagtaagtcacttccgcccgggaccggaagtgtgggatactgcgagtatggcggcgtcaaaggtgaagcaggacatgcctccgccggggggctatgggcccatcgactacaaacggaacttgccgcgtcgaggactgtcgggtcagtatcactctgcgccggggtctcagagtctgggcactcggggctcgggggcggggttccggggacacaggcgggcctcagttttcccggcggtgtgaccggaggcggagcccggggatccatcatagcttctgtaataacgctaagtgctgcagtttgttgaggtctttcccagctcctcttccttctcgtaacagcccaggaaatcggtccctctagttatttacgttttacagtgggttaaactgagtcatagcctgtgctctggccctcagccacccttggatttctaagatggggaaactgaggcccaaagaaggccgcggctccccaaggcaaagctgaggccgcaacccggaacctggagggaatttacaagatgttctatgcagtggttccctgctggcagcccccgcctgcatggtgtcacaggaatccatattctttaaattttcaattttttttttttgagacggagttttgctcttgttgcccaggctggagtgcaatggcgccatctcggctcaccgcaacctccgcctcctgggttcaagcgattctcttgcctcagcctcctgagtagctgggattacaggcatgtgccacaacgcctggctaactttgtgtttttagtagagacggggtttctccatgttggtcagggtggtctcgaactcccaacctcggatgatccgcccacctcggcctcccaaagtgctgggattacaggcgtgagccaccatgcccggcgtaaagttttcaaatgtttaagtaacacgttaaattttgttatcgggctcagcacagaaaattgaaaaagagaacttaaaaggcgcccatactcagtccccaggttaacagacaaatagaaacttttaaacgtaatctaagagtgaatacatacatttctttttttttttttaagacggtatggttctgttgcctgggctggagtgatttcttggcaacctccgcctcctgggctcaagccatcctcccaccccagcctcctgagaagctgggattacaagcatgcgcccagctttctgtattttctatagagatgggatctcgccatcttgcccaggctggtctcgaagtcctgggctcaagtgatccacccacctcggcttcccaaagtgatgggactatcggcatgagctaccgtgctcggcagaatgcatgtctcttaacaaatcaaactttacatttaaattacatgttatgcacattattcctcaattttaacacacacacaaaaatgagcatggtaattaaaaacgtaataattcagacagtagaaaaatcagtgtgaggtgaaaagtcctccccagccccttcttggtttttttattttttatttctactttttgtagagacagggtgcagctatgttgaccaggctggtctcaaactcctgggctcaagtgatcctccagcctcagcctcccaaagtgctggaattacaggcatgagccaccgcggccaacctcctcttgtttttcttgtatcccagaactgagattggcagactttttctataaaagggacagatgacaagtattttgggtttggctggccagaaagtttcagttactgagacaaccatttacaaatggaaagtgttcttagcctgggggctctacaaaaacagattgcctgtgagccaggtggctcatgcctgtaatccccacactttgggaggctgaagcgggaggatggcttgagcccaggagtttgtgaccagcctgggcaacatagtgagacccccacctctaccaaaaattaaaaaaaaaaaaaagaggcttcaggctagatctggcccatgagtgctgtcccagaacacattggaggaatataatgcattctatttcctcatttttcttttttcttttctttctttcttttttattttttgagacagagtctcattctgtcacccaggctagagtgcagtggcccgatcttggctcactgcaacctccacctcctgggttcaagcaattctcctgtctcagcctcccgagtagctgggagtacagttggatgccaccacatccggctaatttttgtatttttagtagagatggggtttcaccatattggtcagactggtctcgaactcctgacctcaggttatccacccacctcggcctcccaaagtgctaatattgcaggcacgacccaccacgcctggcgttgtttgttttttggttgttgttttttgtgtgtgtgttttttttttttagaccaggtcttgctctgtcacccaggctggagtgcagtggcgtgatctcggctcactgcaacctgtgcctcccaggttcaagcgattctcctccctcggcctccctagtatctgggattacaggtgggcgccaccatgccctgcgatttttttttttttttttttttttttttttgagatggagttttcacttttattgcccaggctagagtgcaatggtgcaatcttggctcaccgcaacctctgcctcccaggtttaagcgattctcctgtctcagcctcccgaatagctaggattacaggcatgtgccaccatgcacagctaattttttgtatttttagtagagatggggtttctccatgttggtcaggctggtctcaaactcctgacctcagatgatctgcccgccttggtctcccaaagtggtgggattacaggtgtgagccactgggcccggcctatttttttttttttttttgtatttttagtagtgacagggtttcaccatgtaggccaggctggtctcgaactcctgacctcaggtggtccccctgcctcagccgcccaaagtgctggtattacaggcatgagccaccacgcctggccgagtctcattcttctccggtgtaacctgggctaccccaccccttcaggtgtgcagcacaaggtctgtttccaaatatgcacctgtgtgacctgcagccagaccaggccacagaaggacctcaggcctggaggctccctgagctccctgcttccagcatctcatttttgtataaataccctggtcctctcccagttcaccacagagcagtggccccccctgtgccagacagtgccctaaataccactgcctggggttgtgtctcctaatggtgtggacttttgttacagcacatacacacccaccccagcctttcccggtggaggagtgaggaggatacccctatgctggtgtgctctttgtttatggccctgctttcattgttgagtgagcacatggttccgggccctgtccccaagcgctcacagctgagctgaagagatacaacacatcatgccaggatttctagttgttggtgaggcctgggataacctgggcccacttaagccaggatgtgccaggaggacctctgagaagaagcctgctctgcagaaaaagagcaaacacacaggccctgcctcctctccctctgtcctcctctcctgcctctcctgagccatggtccacagtggccttcccaccagacctaccttctgtgctcctgtccaaggcctggtggccccaagcctggcacccactcccttctgtctgcctgggtcagccattcactcactgccagcgtcccaggacatgatgggctggctcaggctgctttttgttctctttttttttttttttttttttgagacagagtcttgttctgtcactcaggctggagtgcagtggcgcgatctcagctcactgcaaggatggtctcgatctcctgacctcatgatccacctacctcaacctcccaaagtgctgggattacaggcatgagccactgcgcccggctggctcaggccccttttaatccatgccgcttctgaagtgacttcaccccacctcctccactatctcccacacccagttctcctgtccccactccctcctgagcctagcaggcagccctttccttttcatcttgtgtctttaatatatttattgaggttccaataccataccacacaactcacccatttaaagtctgtccaatttaatggctgtgagcggtggctcatgcctgtaatctcagccctttgaggacaaagcggatggatcacctgagctcaggagttggagaccaacctggccaacatggcaaaaccctgtctctactaaaaatacaaaagttagtcgggtatggtggtgcacacctgtaatcccagctacttgggaggctcaagcaggagaatcgcttgaacctggaaggcggaggttgcagtgagccaagatcttgcctctgcactccagcctgggcaacagagtaagactccatctcaaaaaaaataataataatatagtgaagtgtgtccaatttattgattttttagtatattcacaaagttgtatggccattgccatgatcagaatttagaccactttcattacccaaaagaaaccccgtcttccctattagcaatcatcccacccctggcaaacactaatctgcttccttctctgtggatttgcctgttctggccatttcctatcagtgaagtcatagaccgtgtggccttttgtttctggcaaattaatatccagcaccaagtgttgtgttttcattttttgatgggcacttgggtcatccacctactctttggctgctgtgaataatgtgagtatggctgccatgaagattcatgctgtacaggtgtttgtatggatgtagattttcatttttcccttgtgaactttcccctaagagagaaaccactggatcatatggtaacttcgtgtttaacattttgaggaactgccaaattgttttccaaattggctgcaccattttgtgcttccacctgcaatgtatgagagtcccaatttctccacgtctcaacaacactgattattttccatttttttgatcatagccaccatcctagcgcatgtgaagcggtatttcattatggtggagttttttaaaattctttttgggtctttttttgctcagttttctggtcattgatcgttgatttgcatatcactgctggctgatgatgtcgaacattttttcatgtgttttattatttttattttttattatttttttcaagagatggggcctcagtgtttcccaggctggtgtcgaactcctgggctcaagctgtcctcccgcctcagcctctcaaagtgctgagattctaggagtgaaccaccacctttgcatgtgtttattggccatttgtatgtctgtctgtgagaaacgtctattcaaatcctttatatatttttagtagggttttttgtttgtttgttcgtttgtttgttttgagatggagtcttgctctgtcgcccgggctggagtgtagtggcacgatctctgctcactgcaagctccgcctcccgggttcacgccattctcctgcctcagcttcccgagtagctgggacttcaggcacctgccactgcgcccggctaattttttgcatttttagtagagacggggtttcactgtgttagccaggatcgtctcgatctcctgacctcgtgatccgcccgcctcggcctcccaaagtgctgggattacaggtgtgagccactgcgcccggcttagtagggttttttaaattattgaattattgagttgtaagattgtgtatacatatgttgtcttctcagctaattgatagtttcatttacagcacaaaagtttttaatttcaataaagtccgggctgggcacggtggctcatgcctgtaattccagcactttggggggcagaggcaggtggatcacttgaggtcaggagtttgagaccagcctggccaatatggcaaaaccccatctctactaaaaatacaaaaattagctgggcgcggtggcgggcacctgtagtcccagctactcaggaggctgaggcaggagaatggcgtgaacccgggaggcggagcttgcagtgagccgagattgtgccactgcacttcagcctgggccacagagtgagactccatctcaaaaatacatgtataataataatttcaatgaagtccaatttctgtatttttccttttgtcacttgtgcttctggtgtcatatctaagaaacctagtttgaggtcacagagagtgacttacattttcttctaagagtattatagtttcagctcttacgcttaggtctttgatcctttttttttttttttttttgagatggagccttgctctgtcacacaggctggagtgcagtggcgcgatctaggctcactgcaagctccgcctcccgggttcacgccattctcctgcctcagcctcctgagtagcggggactacaagtgccagccaccacgcccggctaattttttgtatttttagtagagacagggtttcaccgtgttagccaggatggtctcgatctcctgacctcgtgatccgcctgccttggcctcccaaagtgctagaattacaggcgtgagccactgcgcccggcaggtctttgatccttttgagttaatttttgtggatggtataaagaaggaacgcatcctcattctttagcatgtggctgtctggttatcccatttgttgaaaagactgttttctctcccattgaattatcttggcacctttgtccaaaatcaattgaccataaatgtgagggtttatttctggactctcagttctgttccattgatgaacatctctgtcctatgccagtgccacactgtcttgtacacacagctgtgggataagttttgaaatactgaagtgtgagtctttcaactttgttctttttcaaaattgttttggctgttctggtcccttgcatttccatatgaatttcccaacctgcttgtcagtttctgcaacaggaaaagaaatggttgggattctgatggggattgcgtttcaaatctgtatcagtttgcacagcgttgccatctgcacaatgctaagtgctccaattcttgaacacaggatgggtttttatttattttggtcttctcttaagaatggccaaggccgggctcagtggctcatactggtagtcccaacactctgggaggctgaggtgggaggattgcttgaggccaggagttcaagaccagcctgggcaacatagcaagaccctgtttctatgaaaaatatatttttcttttttttttgtttttgtttttggttttgttttctgaaacaaagttttctctgtcacctaggctggagtacagtggtgccatctcagcccactgcaaccttgacttcttgggcttaagtgatactcccacttcagccacccaagtaggtgggaccacagatacgtgccaccacatctagctaatttaaaaatatgtattttgggccgggcatggtggctcatgcctgtaatcctagcactttgggaggccgaggaagatggatttacctgaggttgggagttccagaccagcctggccaacatggtgaaacctcgtctctactaaaaaatacaaaaatttagctgggcacagtggcgtgcacctgtaattccagctattcaggaagctgaggcaggaaaatcacttgaacctgggaggcggaggttgcagtgggctgagatcgcaccactgcactttagcctgggctacagagcgagactttgtctcaaaaaataaaataaaatacgtattttgtaaatgtttcactgtgttgcacaggctagttgcaaactcctagtcaagtgatcctctcacctcagcctcccaaaatgctgggattacaagcgtgagccgaaaaaatttgatcccaccactgcactccagcctggacaacagagagaggcccggtctccaaaaccaaaaacaaaaagaatggtccacacacccttttgtgcgtgcccctcaccatgttccccaccagactagcagttcctaaggcacagactctgaggcctggggccttggcccccctgtggttggcgaggaggaagagccctgtgcaggctgcatgcaaatacaagaggccctgcattgtttctgtcatctcatacatctctgttctatgccagtgccacgctgtcttgtacacacagctgtgggataagttttggaatttatttcttctttggaatttatcttacagatgggcctgcgtatgagtgcgcaggtgtgagggtgcaggttctccccaagggcccattttctgcaccagaaggctgagggcagcccaggtctgtcccctgggttctctgtagccgtggaaaataatgagatatggccgggcacggtggctcacgcctgtaatgccagcacttgcaggtggatcatgaggtcaggaggtcgtaaccagcctggccaatatggtgaaaccctgtctctactaaaaatacaaaaattagcctggcgtggtggtgggcgcctgtagtcccaactactccggaggctgaggtggaagaatcgcttgaacccaggaggcagaggttgcagtgagccaagatcttgccactgcaccccagccagggcaacagagtgagattccgtctcaaaaataaattaattaaaaaaaagaaaagaacgagatatgaccagcctgggcaatatagcaagaccccatctgtacaaaaattagttaactggacatggcacacacctggggtcccagttactcgggaggctaaagtggaaggatcacttgaacccaggagttggaggctgcattgagccatgattgcgcccctgcactccagcctgggtagcagagtgagaccttgtctcaaaaccaaaaaccaaaaaaggaaaaaaaaatgaacaaggcagctgatgaaacctcccatgtgctagacaggaggctgagagctgggagctggccctgagcaccctgggcctctccagagatgtgcctctgagcccggacccagcacaccctcattacctgtagtatggaaatgtcttagccctgacttgggcttctaacaggttaaataaccaggtacaaatttgagccagtttctcatttatctccgggtctagcagaggtgcccccgtgagctccatgctggagcagagctgaaggcagaagagcatgacaggtgcagagcagggcccggcaggcacagagtagccccagcaggcatagagcagggccagtgccctggaggcctggagatggccttgccttccacctgctggtcatttcctgggtgttgactggagcctggcctacctgagcttttcattcatcccaccaagtgcaaagcctgtccagagaagagactggggctggaaggatctggagggtgcagggtgagcctgggagccagatcccagacagcccaggcctctctgaagatcccagtgggcccccagcctgtcagtcaggattagagcaaggccccactggtgctcagtaaatattcatgatggcctaggtccttcctggggtgcagggcagggggcttcaccctgcagagccaagaggtagcacggccacccctagagtccggggggtggctgggcagcccccacagggcactgcctgtccctggcagctgtgtgcagcccccgcagggcagcacgcggaactgtggcccaggtggccgggagccaccatggacactgtcagaactgcccttccacttcagggccagcctgccgcccagggtccaaacagccttctagaacacgatggacctggggcccccctagcaaccaccatctagaccctcaggcctcctgaggttgctgcctggcttgtacctttcagaaaacccctggcatgggggcagaggtgtcacagtccaagcagcctcactcctgagaagccgccagtgtcccctgattgcagagtgggcagcgcctggagctgtggaggagggtgtctgggggcgggctggcccgctgagcagcgcctctcttcacaggctacagcatgctggccatagggattggaaccctgatctacgggcactggagcataatgaagtggaaccgtgagcgcaggtagggcccctggtgggcgttgtctgaaagtgcccccccggcgagttgtcggggtcctgtagcattccgctgttgtctgtgctggcgaggggtgaacgggccccttggacttggctgtgcaatcccaggccccagaaagtgcagatccagacccagcacttccacttctaggctctgtcctcgagatgtctccatgtctgcaatcccagcactttgggaggccaaggtgggagcattgcttgagcccaggagttcaagaccagcctgggcaacagagggaaaccctgtcctcgccaccccaaaaaatgtgtctagtgaggagggttgggacccgtggatccagattaggacaggatatgagtggggggcctgcctcgggccctctaagcaggattttgtcagaggtgaccaggctcaaaccagaccacaccaggcagtggacacacagggccagatgaactagggccaggcgcccccctctccctgtgtcacaggctgggcactccttccccacccctcccccaaccccaacgcaggccaggcaggactgggagatgggggtcattgcagggaacttggaaactgccagaaagcagggagaagaaaggaaagattgtggccccgcctgccccagcctcacacactgattattttgagatgaaggggacgtggttttgtgaggcccagagccccgtgatgaagtcaccccctcttcgtcgcgatcatcaggcagagttatttttaggataaaaaaagtttttaattgaaaagaaagtagaaagccaacagtcttgtgggcagtcacccgtgcagctgcctgcacccgccctcctctcaggctcctggtgggctctgcccacagcccttgcccttcccgcgaccctcgccctgccccctgcctgcctccccgcccccctccgcctcttcccccagcagcaccctggcccctgaggtctgtgctgcctgtgctcccccgacctagcctggtctgacctgagtgtgggtttcgggctttcacaggcgcctacaaatcgaggacttcgaggctcgcatcgcgctgttgccactgttacaggcagaaaccgaccggaggtagcaccgcaggggccaaggttgggaggtcactggccggaaggccccaggctgcagggcctgacctgcatccccgaaggtggccagaatgcacgtgggggccatcgccctgtgccgtcagctgcatcctcaggcgtggagacttagtggagacccaagggggcgaaccggaaggcttcctggaggaggaggcagcactggggttggggcaagagaaaagctaggagttggctgggggaaaaggagacagggtcggagggaggcttgaaggggtgctactaggggccctaggcaggggcccctcagggcactgaggccccacccccaccatcggccccatccccacaggaccttgcagatgcttcgggagaacctggaggaggaggccatcatcatgaaggacgtgcccgactggaaggtgggtcccggctgggagggcagaggtgccagccacggcagagacagggcctggggttggggagctcccacagctttctatagaaaccccaggaccaagggggtggtgggtgccaggtcccacaagggaaggctgtagcgcctgccacgcacaggggccactgatcctgggggatgggtcctagcaggctgtatatgggtggctgtgcctctacccataccccactgtccccacaggtgggggagtctgtgttccacacaacccgctgggtgccccccttgatcggggagctgtacgggctgcgcaccacagaggaggctctccatgccagccacggcttcatgtggtacacgtaggccctgtgccctccggccacctggatccctgcccctccccactgggacggaataaatgctctgcagacctggcctgcctgttttcctggggactgggggaaagaagggggagagggcccagctaggcaccaccggatcacatgtagcatggggacgcagcagatatgcacagggtgacctcaaaacacacctaggggctgcccctggatccactggcggcctcctctctgcctccgatatacctggactctcctgcctcccttttgaaaccatgcctgtcagcagcccacttacctctccaggctgggggcccctgggtcagctttgggtcagaccttctccacggaggtctggagagtggggggagccttgacctcccggatacaagtgatcctcccgcctcagcctcccgtgtcactgcgattacaggattacaggcgtgagccaccataccttgtgcagccctgccaattgtaggcatggcgagggtatttgtctgcggaggggctcctcgctccctgagagggaagctcagagacacggggatatctgcagggaaagtaagtcgggggaagcaaccaagattggccaggtgcctctgctgtgggctcctggcacgaaagggtgaagtccgtctgagtccaccgaccaatggtgacgcgcagcgccttcgcggcgcttcctgattggcgggcatgcagggtgggcgggagggaggagaagagggggcgtcccctccctccacggatgcgcttaaaaggcggtggcggtggcggcagcgcccggcgcccgggctcacctcggccatgagcagcgcagccggcccagacccgtcggaggcgcccgaagagcggcatttcctcaggtcagctggggagagggaagctggagacgggcatggttcccatggggccaggagcagcccgtaggaccggaggcagggtcatagctgggacagaatggggtccggggactggagacgggcacagccgggatggaggttcaacggcagaggcatgaccacggtggggaaccggaggcagggatatggccaagacgggcctgggaatcccgggaatccgagaccctcctggcatcttgctggagacactaagctgcgttgctggggaaactgcctccggggcagcccgcccctcatgaatgattcatcagcagcgctggtcgctcccccaccgaaccccaaccgtggcccacccccactctccatctctcccagggccttggagctgcagcccccacttgccgacatgggaagagcggagcttagctcaaatgctaccacctcccttgtccagaggaggaaacaggcctggggaaggcagtcatggctagagcagatttggaacgcagggcctgtttgccagaggttggtgagtttgggatctagaactggcgccgtggctgtgactctcacctcatcctcctcagcctttgtgacatgggaccccaggcaaggctgttgacctcactgtgaaccagatgcgtccaacagctcctgcccactgcccacctagcagggcacgtgtcccctcagccgatgtccagactcagtctagggaagagtgttttaggagctgtgacttcaccttggggtgaaggggtgaggtgaggggggcctcaaatgctaagtgaggggagtgagggggctctcaggggtgggtaggagctagaacgtagtggggaactggctgacgaggctggagacacagaagggcctcttaggcatggtgaggagtttggagtttgaatgttcccagagccctcgggagccatcagcaggtttgggacccggtgatgcaatctggtgttcgagttttcaaagcccccccaggctcatgttgagttttgggggcaggaggctgctgtgtgcggccaggtgatcccccgtggtggtctggtgggcagaggtgtgaggtggagagaagcaggtaggactgagagcagggtgagtgtggcatggccaccctggcctgaggtttcacctcccagaaagccccctcctggaagcatttggcgagtgtcaggcccagttccctttggacccaggccacttcaggcctcctgggtctgacagggaaatccttggggccttgaagcttctctcatctaggggccgagattcgggatagcaaaaggcaccactgaacacccccagaatcccacaacagcagaagggacctgccctgcctgccaccctccttcaccaggctccaattcccacgcagcctcccacccccaccccacagctgctgctgtgccccacccccaggttcctaacctggacgaccctctgcccacagagcccccattattctaatgaccagttagacaggaagagaatgttccaagtggctgctagaggccaaagctttgggacagaagaagaggaatgcatcgccctcccgccctccacttcctccctgcaccctcctgcgggggcagcagtcagagctgtcacaagatggaggtggaggaatgagccatgttcccagcctgccagattcctcaccccgaatgcaaacgcacctcctatgtgctttcctgggagctgcgctggcctgccccggggggactctgtctgacttcaccatgagctccttttcctcaccccgtccttcaacttcatcctatgtcagctgcagacaggctgaggtttgaatttggctctgtttactggggtgtcccagggcatgtgactttcctgccctgagtctctgtctccgtctttatgtgtggacccccgaagtgtcctcttcaccatgttcctcagtctgggatttgaggctctgcctgccctgtccgcttgatcactctgcttcagcctcccttctgccccttgaacataccaggctcctccccaccccagggccttggcttttgctattcttgcccctgcattacctgccacgatgtgccaggcctcctcctccaggaagccctcgctgactcccatcccatagcagtcctccttctcctgcactctgcctacctggccttatcatgctgcaaaattggccagagggcagacatctcccactcagagagttgaaggaaagagtctcaggattcatcccctcaaaacatccaccatctgtaggtctggctctatgtctttgttcatgtcctgtggctctggagacaccaagggggaaagacccagtttcccaacttgcttcctgcatgatcctgggcaagccactcggcttctctgaatcattagttgtttttccaacttttctaggcctggctctttttatttatgtttgtgttttttattattatcttagagacaaggtcttgttctgtcgcccaggctagagtgcagtggcgtgatcatagctcactgcagcctccacctcccagattgaagtgatcctcctgcctcagcctcctgggtcaccgggattacaggtgtccaccaccacgcccagcctagtctgaccaattgtgtaggtcacccgaatattcagttttgctccgagaggtggagacggaccccagtcattcagtgaagtggatggcagagcttcacctccagctaagtagccacattttctggcaacaaataaccttttttttttttttttttttttttttttttggagacggagcctcactctgtcacccgggctggagtgcagtggcacgatctcggctcactgcaacctctgccacccgggttcaagcgattctccaggttcaagccttagcctcctgagtagctcgtactgcaggcacccaccaccatgcctggctaattttttgtatttttagtagaaacagggtttcaccatgttgggcaggctggtctggaactcctgacctcaagtgatccacccgcctcatcctcctgaagtgctgggattacggatgtgaggcaccgcgcccggcctggccacaaataatctaattatgtcactgcccctgaaaatcggtcaccaaagggtctcatagccccaggccccaaggcctccccgctgagtgtgccatcaaacactgcagccttaaaaacccatggaccccagatgcccccagtcctgtccacccctttcagcgtcctgaagcttgttccgtggctcccactgcctgaaatcagcccatcgcccccatcgaagtccttcatgctccattcccctttcttggttccctccgccttgggagctggggacgtctaggtccggttccgtgtcccacgctttggagcagtagaaccaacgcgcggccagcgcatcttctgccaccagagggcgcccgcgcctcgggctttggctcccacaccgcggcccgccaggcctcgattcaacccgcgcgtcgcacggtgaaactgagggcatccccagctcaaggctgcagacgctactcgggggtacggggtgggagggtggcattgggaccgggttcagaagcttggcggaacatttctggctccatctgaggctctgtctctgtgtgtctctgagtgtcccatcccactctgtccccagcaccgcggaggcagccgccctggagcgggagctgctggaggattatcgctttgggcggcagcagctcgtggagctgtgcggtcatgctagtgccgtggctgtgaccaaggtacctgacccctgacccccaaccctgaccccaaccagacggccaactctcctgagctgcatgactgctgtgaccagggtggttcacccctcaagaactccctttttgcttgggcctaccccagcctgatgggtaaactgaggcccagagaggctcatggctggtgcaggccagatggggacctgagacccctggtatcagagaaggccagggtggaggttattgcagggacagtgccacgaccctggaagtgcaacccctcctgcacatgtgacccgcctgcttctgccacctcctgggtcttgggcaccagggacatctgctcctgcgatctgaacacccctaaacaaccctgttctgcaggtggggaaactgaagctcagaggtggcgaggggcctgccctgggtcagagggggatggaagcagagctgcaacccaggtgtgtctggctctggagtaaacccccacacctcgaggggccaggaggatgacacaagggtgatagcaataatcatactatggagtgcttcaccgtgcagccagcagtgctgggcatcagtttcctctgcaacagcataataaatggtactgacgagtcagtccctaaacgtgaacgcctcagaaaactgtcccatacagtcgaggctctagcgtgactgcctcctcttcctcccctgccctcctcatccccctcgcctttctcctccttcctcctcctcctgccccctcctcttaccctcctcctcctttctctctccctcctcctccccttccgcccctttcttctctcctttctccttcctctccctcctcctccccctcctcctgttctccttcctccttcccacttaccctacctcctccccatcctcctcctccccattctctccctcctcacccctcctcctctttttcttcttattaccacggtatactttttaaaaactcaatgtttttcttcatgtggacttaaatgtttgtatttccaaatgaaatagatcccgggtgaggcgcccaaaggagaaggaaaatcaaaaccccagaaagaaacccagtagtcactactcgcctggcgctcagtggccaactgtctggtttttgcactgaaagccccttgtctgtccagaagcccctcagtcccagtcttgggtcttgggctctgggcccggtgtggctgggatcgcaggcatgttcatggcaggtcaggactgcgctaagcctttggggaggatacttgaaaggggagtaatctgctgtctgtgtggttggagcttaaagtacagctggggctcaagagacacccagagtgcctgtcaggcggtggcactgtcatcgcatttgataaaggccaaactgagtctgggagagaaggggctggggccacgcagaatcagggcagggctggggccaaaatgcctggagagacagagtctgagagatacagagatggccagagacagatggagagagacagataacagagagatacagagacagccagagacaaatggagagagagacaaatggagaaagagagccagagacatacagaaagacagagacactagagtctgagagatacagacagacacagagacagccagagacagatggagagagacagagacacaaagagagccagagacacagagagtctgagagatacagacagacacagagacggccagagacggagagagacagagacagacagacagagacacagagagtctgagagatacagaaacagccagagacaggtggggagagagacatgaagagagccagagacatacagagagacagagacacacagagagacagagacacggagagtctgagagatacagagagacacagagacagccagagagagacagagaggccccagggcatcgtggctaaggttgggctcccctactccacagcctccaggaggggctgaggtctggaaacatgggcgggggtgggcccgcggtgagaaaggtggaagaatgtctgcaactcaggcggagaataaacaaaccgcactccgggcgacgggcagtggctggatgcacgtttttcctgcaccgacctggcagagcctgagaccgggcctctgcatctccagcggggaaactgaggccccaagaggcccaacccctcatccagaacagctcacctcctgtcctatcctgttgcctccaggcccaagccccatcccttcccctactccgggcctcagtttcctctccaggcaaggaggaatctggactgtgcctgtgcctttgctgtgtcccctaccaccaggcgttcccgttgcccgctctctcccggaagcagaggacggtgctggtcgtgtgtggcccggagcagaacggggcagtggggctggtctgtgcccggcacctgcgggtgtttgtaagtagcaaggaccccttcgacctcccaaagtccctgcccctgcagaaatcactgccttcttttgatagcttcccagggggacattgacgcagggccaggttatagaatatgcccagtgcttgtcccaggcagggtctggtgctggtgaccaggtcaggggagtctgaccccctcttctcccacccccaggagtatgaacccaccatcttctaccccacacgctcgctggacctgctgcatcgggacctgaccacccagtgcgagaagatggacatccccttcctgagctacctgcccactgaggtcagcgctgggtggcaagcaagggggacatggtgtgcagtggccctgggccaccctgaccctgcctgccttccccaggtgcagctcattaacgaagcctatgggctggtggtggatgccgtactgggccccggcgtggagccgggcgaggtcgggggcccctgcacccgcgcgctggccacgctcaagctgctgtccatccccctcgtgagcctggacatcccctcaggcatgccaggcagaggggggcacattggggcctggggggcttgggtggaggcccctgtgccccagctcctggtcgcccctgcctgtctgaacctcaatctccccagcttggatggacccacacttggctgaggctaagggtcacacccatccctctgatggggaagatcgaggctgccaccccaggtgaccccaggtctcctctttcctccaccccagtgcccagcccacatgccctctgcccacccctggcccagttgcctgggcagacgtgagctcactcggcaaaggccgcgcccgccctggctgccgccccatgcctgttggaaccattaggcgacaggcagacggaacaaacagccgctggccagccggaccctccgtgggggtggctggactccgggggatgtcccctggctctcgggatcccagggacatcccagcaggtgccacagagcaggggcaccaagggaggcggcgtgctgtctgatctgagtagggaggctgcaggctcagcctaggacagagagggtggctctgtcaggtcagaggggatggttaggaacctctagtctgagggtggtggctagggtcagagaaggattaaagtctgagggaggatccagtgtcttctggtgagtggccccagaatcaagtcagagataggagagaaggcaaggctcctaggctgaaagtggaggctcattcaagaggtgacggaggctgggtgcaggggtcacacctgtaatcccagcactttgggaggtcgaggtgggcgggtcacctgatgtcaggagttccagaccagcctggccaacatggcgaaacccagtctctacaaaatacaaacatttgctgggtgtagtggtgcacgcctgtagtcctagttacttgggaggctgaggcaggagaatcgcttgaacccgggaggcagaggttgctgtgagctgagatcgtgccactgcactccagcctgggcaatagagagagactgtatcttaaaaacaaacaggctgggcgcaatggctcacacccataatcctagcactttgggaggccgaggtgggcagatcacaaggtcaggagttcgagaccagcctggccaatatggtgaaactccatctctactaaatatacaaaaattagccaggcatggtggcgtgtgcctgtagtcccagctactcgggaggctgagacaggagaattgcttgaacccgtgtggcagaggttgcagtgagccgagattgcaccattgcactccagcctgggtgactgaagacagaggctgggtcagatggaggagggcgattgaatagtaggataggagcagaagcagaaagtctgagtgcagaagctctggtctgattgggagggaaacacctccaaggactgggagagacttgtctgagggcggaggcagagttctagggggcgacaagtctcaccaggacccatgtgccagagagaaaaggctgggtctgatgggggaggggaagtgggggtggggcagcaggactctggtctgagggcagaggctcagtgttggaggggagaggagaggaggcagggacaggatggactctaggctgagggcaggccaccctcccagttcccaatccccccggaccctcctccctcaggctgggacgcagagaccggcagcgattcggaggacgggctgcggcctgacgtgctggtgtctctcgcggcgcccaagcgctgcgctggccgcttctccgggcgccaccacttcgtggccggcaggttcgtgcccgatgacgtgcgccgcaagttcgctctgcgcctgccgggatacacgggcaccgactgcgtcgcggcactgtgaccgccacccgcggccacaccgcagggaccctcgccaataaacagccctcccaccaccgccgcctcgcctccgcctcctttgtgcaccgggcccgctgcgggggtgggcacactcgaagagggacttcacacggtccctgggtgatccaaggcggggagcatgagaagggcggtggagtgggacttcccgctggcctagaaaacttcagctagggctgggggcggtggctcctgcctgtaatctcagcactttgggaggctgaggctggaggatcgcttaaggccaggagtttgggaccagcctgggcaacatagcaagatcccgactctacaaattaaaagaaaaagaagaaagaaaactcgagccagaagaatggagggtagattcagggtgggactcccagactgtttggggtggcctaaagcctataggatcgaagtgagacgcgagacaggacttccagccacctaaagcgggtccgagcagcttgaggctggattccaagtgacacttccctcaggcagcttgggatgcagcttggaggactgagtgggctcggggagggagttccagcaggccacggggaacccaggacagcctgaggacggaggcacagccagacgcaccaaggggggcgacccagaggggttgctcgagcgccgtcacccagggccagggggcgtggcctgaatggggcgtggccagggcgggatctgcggtcgcatcccgcccccactctcagtcccagcggccgccagacccgccggagttggacccgagcacgccgcggagcccggaccctccctcggacgctctgccccggccatggcgtcgctgctgccactgctctgtctctgtgtcgtcgctgcgcacctggcgggggcccgaggtgaggcgcctccagcccccgcgcccagcccctgaggctcccgagggcctggcagccggccttgggtgaagccgcactcggggagagaacccagggacccacgcgcttccccggggactgggtccccttcaccagtcggatccccgcgaccacctggggcgcggagcgggcctcatccattctcttccttggctaagccgggagtgtggataagaacctagggttcctcccggggtttggactctgaatcaccggccaggtctcccaccctggaccgaaggggtcggaactggcccctcccacctaactcccacacacgcactcactccaaccgctggagaaagaaatgcccatccctggaacactcaatggggcgggggacgggcccacttctcaagtgaggagactgaggcacccagaaggaaggggcttgtctgacctcatcactctgctgggagtatcttggacagctcctatcttggagaagccagtctagattccaaggacttcccggcagctcggactgtagtacagggatggaagacagactaagggaggggcttccagcaggccaagtggatgagggggagcccagcctgagggcagaggcacagccagctgaacttgattgatctcgcggcagctgaacatagtgggagggagactctagcctaggggaactgggtggtacttgcacttccccagccggggggttagggctaggtcagagagaggtacctggctttgggggcctggtggtggtcatgggcagcgcgctggaggagagtgtatgg
